(19) United States
(12) Patent Application Publication
(10) Pub. No.: US 2010/0184027 A1
(43) Pub. Date: Jul. 22, 2010

(54) METHODS AND NUCLEIC ACIDS FOR ANALYSES OF CELLULAR PROLIFERATIVE DISORDERS

(75) Inventors: Catherine Lofton-Day, Seattle, WA (US); Andrew Z. Sledziewski, Shoreline, WA (US); Ralf Lesche, Berlin (DE); Matthias Schuster, Berlin (DE); Juergen Distler, Berlin (DE); Reimo Tetzner, Berlin (DE); Thomas Hildmann, Berlin (DE); Fabian Model, Berlin (DE); Xiaoling Song, Woodinville, WA (US)

Correspondence Address: DAVIS WRIGHT TREMAINE, LLP/Seattle, 1201 Third Avenue, Suite 2200, SEATTLE, WA, 98101-3045, US

(73) Assignee: Epigenomics AG, Berlin (DE)

(21) Appl. No.: 12/373,709

(22) PCT Filed: Jul. 13, 2007
(86) PCT No.: PCT/US07/73509

§ 371 Date: Feb. 24, 2010

Related U.S. Application Data
(60) Provisional application No. 60/831,045, filed on Jul. 13, 2006.
(60) Provisional application No. 60/844,338, filed on Sep. 12, 2006.

(51) Int. Cl. C12Q 1/68; G01N 33/53; C07H 21/04

(52) U.S. Cl. 435/6; 435/7.92; 435/7.1; 536/23.1

(57) ABSTRACT

The invention provides methods, nucleic acids and kits for detecting, or for detecting and distinguishing between or among proliferative disorders. The invention discloses genomic sequences the methylation patterns of which have utility for the improved detection of and differentiation between said class of disorders, thereby enabling the improved diagnosis and treatment of patients.

### FIELD OF THE INVENTION

[0001] Particular aspects relate generally to genomic DNA sequences that exhibit altered expression patterns in disease states relative to normal. Particular embodiments provide methods, nucleic acids, nucleic acid arrays and kits useful for detecting, or for detecting and differentiating between or among cell proliferative disorders. Particular methods and nucleic acids for the detection and diagnosis of cell proliferative disorders as provided herein, are preferably used for the diagnosis of cancer, and in particular colorectal and/or liver cancer.

### CROSS-REFERENCE TO RELATED APPLICATIONS

[0002] This application claims the benefit of priority to U.S. Provisional Patent Application Nos. 60/831,045, filed 13 Jul. 2006, entitled “METHODS AND NUCLEIC ACIDS FOR ANALYSES OF CELLULAR PROLIFERATIVE DISORDERS” and 60/844,338, filed 12 Sep. 2006, of the same title, both of which are incorporated herein by reference in their entirety.

### SEQUENCE LISTING

[0003] A Sequence Listing in paper form (346 pages) and comprising SEQ ID NOS:1-173 and is included with this application and is incorporated by reference herein in its entirety.

### BACKGROUND

### Incidence and Diagnosis of Cancer

[0004] Cancer is the second leading cause of death of the United States. Mortality rates could be significantly improved if current screening methods would be improved in terms of patient compliance, sensitivity and ease of screening. Current recommended methods for diagnosis of cancer are often expensive and are not suitable for application as population wide screening tests.

[0005] Hepatocellular cancer (HCC) is the fourth most common cancer in the world, its incidence varies from 2.1 per 100,000 in North America to 80 per 100,000 in China. In the United States, it is estimated that there will be 17,550 new cases diagnosed in 2005 and 15,420 deaths due to this disease. Ultrasound of the liver, alpha fetoprotein levels and conventional CT scan are regularly obtained in the diagnostic evaluation of HCC (hepatocellular cancer or primary liver cancer), but they are often too insensitive to detect multi-focal small lesions and for treatment planning.

[0006] In the United States the annual incidence of colorectal cancer is approximately 150,000, with 56,600 individuals dying form colorectal cancer each year. The lifetime risk of colorectal cancer in the general population is about 5 to 6 percent. Despite intensive efforts in recent years in screening and early detection of colon cancer, until today most cases are diagnosed in an advanced stage with regional or distant metastasis. While the therapeutic options include surgery and adjuvant or palliative chemotherapy, most patients die from progression of their cancer within a few months. Identifying the molecular changes that underlie the development of colon cancer may help to develop new monitoring, screening, diagnostic and therapeutic options that could improve the overall poor prognosis of these patients.

[0007] The current guidelines for colorectal screening according to the American Cancer Society utilizes one of five different options for screening in average risk individuals 50 years of age or older. These options include 1) fecal occult blood test (FOBT) annually, 2) flexible sigmoidoscopy every five years, 3) annual FPBT plus flexible sigmoidoscopy every five years, 4) double contrast barium enema (DCBE) every five years or 5) colonoscopy every ten years. Even though these testing procedures are well accepted by the medical community, the implementation of widespread screening for colorectal cancer has not been realized. Patient compliance is a major factor for limited use due to the discomfort or inconvenience associated with the procedures. FOBT testing, although a non-invasive procedure, requires dietary and other restrictions 3-5 days prior to testing. Sensitivity levels for this test are also very low for colorectal adenocarcinoma with wide variability depending on the trial. Sensitivity measurements for detection of adenomas is even less since most adenomas do not bleed. In contrast, sensitivity for more invasive procedures such as sigmoidoscopy and colonoscopy are quite high because of direct visualization of the lumen of the colon. No randomized trials have evaluated the efficacy of these techniques, however, using data from case-control studies and data from the National Polyp Study (U.S.) it has been shown that removal of adenomatous polyps results in a 76-90% reduction in CRC incidence. Sigmoidoscopy has the limitation of only visualizing the left side of the colon leaving lesions in the right colon undetected. Both scoping procedures are expensive, require cathartic preparation and have increased risk of morbidity and mortality. Improved tests with increased sensitivity, specificity, ease of use and decreased costs are clearly needed before general widespread screening for colorectal cancer becomes routine.

[0008] Early colorectal cancer detection is generally based on the fecal occult blood test (FOBT) performed annually on asymptomatic individuals. Current recommendations adapted by several healthcare organizations, including the American Cancer Society, call for fecal occult blood testing beginning at age 50, repeated annually until such time as the patient would no longer benefit from screening. A positive FOBT leads to colonoscopic examination of the bowel; an expensive and invasive procedure, with a serious complication rate of one per 5,000 examinations. Only 12% of patients with heme positive stool are diagnosed with cancer or large polyps at the time of colonoscopy. A number of studies show that FOBT screening does not improve cancer-related mortality or overall survival. Compliance with occult blood testing has been poor; less than 20 percent of the population is offered or completes FOBT as recommended. If FOBT is properly done, the patient collects a fecal sample from three consecutive bowel movements. Samples are obtained while the patient adheres to dietary guidelines and avoids medications known to induce occult gastrointestinal bleeding. In reality, physicians frequently fail to instruct patients properly, patients frequently fail to adhere to protocol, and some patients find the task of collecting fecal samples difficult or unpleasant, hence compliance with annual occult blood testing is poor. If testing sensitivity and specificity can be improved over current methods, the frequency of testing could be reduced, collection of consecutive samples would be eliminated, dietary and medication schedule modifications would be eliminated, and patient compliance would be enhanced. Compounding the problem of compliance, the sensitivity and specificity of FOBT to detect colon cancer is poor. Poor test specificity leads to unnecessary colonoscopy, adding considerable expense to colon cancer screening.

[0009] Specificity of the FOBT has been calculated at best to be 96%, with a sensitivity of 43% (adenomas) and 50% (colorectal carcinoma). Sensitivity can be improved using an immunoassay FOBT such as that produced under the tradename ‘InSure™’, with an improved sensitivity of 77% (adenomas) and 88.9% (colorectal carcinoma.

[0010] Molecular disease markers. Molecular disease markers offer several advantages over other types of markers, one advantage being that even samples of very small sizes and/or samples whose tissue architecture has not been maintained can be analyzed quite efficiently. Within the last decade a number of genes have been shown to be differentially expressed between normal and colon carcinomas. However, no single or combination of marker has been shown to be sufficient for the diagnosis of colon carcinomas. High-dimensional mRNA based approaches have recently been shown to be able to provide a better means to distinguish between different tumor types and benign and malignant lesions. However its application as a routine diagnostic tool in a clinical environment is impeded by the extreme instability of mRNA, the rapidly occurring expression changes following certain triggers (e.g., sample collection), and, most importantly, the large amount of mRNA needed for analysis (Lipshutz, R. J. et al., Nature Genetics 21:20-24, 1999; Bowtell, D. D. L. Nature genetics suppl. 21:25-32, 1999), which often cannot be obtained from a routine biopsy.

[0011] The use of biological markers to further improve sensitivity and specificity of FOBT has been suggested, examples of such tests include the PreGen-Plus™ stool analysis assay available from EXACT Sciences which has a sensitivity of 20% (adenoma) and 52% (colorectal carcinoma) and a specificity of 95% in both cases. This test assays for the presence of 23 DNA mutations associated with the development of colon neoplasms. The use of DNA methylation as colon cancer markers is known. For example Sabbioni et al. (Molecular Diagnosis 7:201-207, 2003) detected hypermethylation of a panel of genes consisiting TPEF, HIC1, DAPK and MGMT in peripheral blood in 98% of colon carcinoma patients. However, this does provide a suitable basis for a commercially marketable test, as the specificity of such a test must also be sufficiently high.

[0012] The current model of colorectal pathogenesis favours a stepwise progression of adenomas, which includes the development of dysplasia and finally signs of invasive cancer. The molecular changes underlying this adenoma-carcinoma sequence include genetic and epigenetic alterations of tumor suppressor genes (APC, p53, DCC), the activation of oncogenes (K-ras) and the inactivation of DNA mismatch repair genes. Recently, further molecular changes and genetic defects have been revealed. Thus, activation of the Wnt signalling pathway not only includes mutations of the APC gene, but may also result from β-catenin mutations. Furthermore, alterations in the TGF-β signalling pathway together with its signal transducers SMAD4 and SMAD2 have been linked to the development of colon cancer.

[0013] Despite recent progress in the understanding of the pathogenesis of adenomas and carcinomas of the colon and their genetic and molecular changes, the genetic and epigenetic changes underlying the development of metastasis are less well understood. It is, however, generally well accepted that the process of invasion and proteolysis of the extracellular matrix, as well as infiltration of the vascular basement membrane involve adhesive proteins, such as members of the family of integrin receptors, the cadherins, the immunoglobulin superfamily, the laminin binding protein and the CD44 receptor. Apart from adhesion, the process of metastasis formation also includes the induction and regulation of angiogenesis (VEGF, bFGF), the induction of cell proliferation (EGF, HGF, IGF) and the activation of proteolytic enzymes (MMPs, TIMPs, uPAR), as well as the inhibition of apoptosis (Bcl-2, Bcl-X). More recently other groups have compared the genetic and molecular changes in metastatic lesions to the changes found in primary colorectal cancers. Thus, Kleeff et al. reported the loss of DOC-2, a candidate tumor suppressor gene, both in primary and metastatic colorectal cancer. Furthermore, Zauber et al. reported that in their series of 42 colorectal cancers Ki-ras mutations in the primary cancers were identical in all of the 42 paired primary and synchronous metastatic lesions. Similarly loss of heterozygosity at the APC locus was identical for 39 paired carcinomas and synchronous metastasis. The authors concluded that for Ki-ras and APC genes the genetic changes in metastasis are identical to the primary colorectal cancer. However, other groups have found genetic and molecular changes in metastatic colon cancers, that are not present in the primary cancers. Thus, the development of LOH of chromosome 3p in colorectal metastasis has been reported. In addition, using comparative genomic hybridization several alterations were found in liver metastasis that were unique to metastastic lesions (-9q, -11q, and -17q).

[0014] CpG island methylation. Apart from mutations aberrant methylation of CpG islands has been shown to lead to the transcriptional silencing of certain genes that have been previously linked to the pathogenesis of various cancers. CpG islands are short sequences which are rich in CpG dinucleotides and can usually be found in the 5′ region of approximately 50% of all human genes. Methylation of the cytosines in these islands leads to the loss of gene expression and has been reported in the inactivation of the X chromosome and genomic imprinting.

[0015] Recently several groups have also analysed the methylation of various genes in colorectal cancer and reported the transcriptional silencing by promoter methylation for p16INK4, p14ARF, p15INK4b, MGMT, hMLH1, GSTP1, DAPK, CDH1, TIMP-3 and APC among others. Thus apart from mutational inactivation of certain genes, the hypermethylation of these genes also contributes significantly to the pathogenesis of this disease.

[0016] In recent years several genes that are methylated in colon cancer have been identified by MS-APPCR. This group of genes, among others, includes TPEF/HPP1 which is frequently methylated in colon cancers and which was independently identified by two different groups using the MS-APPCR method (see, e.g., Young J, Biden K G, Simms L A, Huggard P, Karamatic R, Eyre H J, Sutherland G R, Herath N, Barker M, Anderson G J, Fitzpatrick D R, Ramm G A, Jass J R, Leggett B A. HPP1: a transmembrane protein-encoding gene commonly methylated in colorectal polyps and cancers. Proc Natl Acad Sci USA 98:265-270, 2001).

[0017] Multifactorial approach. Cancer diagnostics has traditionally relied upon the detection of single molecular markers (e.g., gene mutations, elevated PSA levels). Unfortunately, cancer is a disease state in which single markers have typically failed to detect or differentiate many forms of the disease. Thus, assays that recognize only a single marker have been shown to be of limited predictive value. A fundamental aspect of this invention is that methylation-based cancer diagnostics and the screening, diagnosis, and therapeutic monitoring of such diseases will provide significant improvements over the state-of-the-art that uses single marker analyses by the use of a selection of multiple markers. The multiplexed analytical approach is particularly well suited for cancer diagnostics since cancer is not a simple disease, this multi-factorial “panel” approach is consistent with the heterogeneous nature of cancer, both cytologically and clinically. Key to the successful implementation of a panel approach to methylation based diagnostic tests is the design and development of optimized panels of markers that can characterize and distinguish disease states. The present invention describes a plurality of particularly efficient and unique panels of genes, the methylation analysis of one or a combination of the members of the panel enabling the detection of colon cell proliferative disorders with a particularly high sensitivity, specificity and/or predictive value.

[0018] Development of medical tests. Two key evaluative measures of any medical screening or diagnostic test are its sensitivity and specificity, which measure how well the test performs to accurately detect all affected individuals without exception, and without falsely including individuals who do not have the target disease (predicitive value). Historically, many diagnostic tests have been criticized due to poor sensitivity and specificity.

[0019] A true positive (TP) result is where the test is positive and the condition is present. A false positive (FP) result is where the test is positive but the condition is not present. A true negative (TN) result is where the test is negative and the condition is not present. A false negative (FN) result is where the test is negative but the condition is not present. In this context: Sensitivity=TP/(TP+FN); Specificity=TN/(FP+TN); and Predictive value=TP/(TP+FP).

[0020] Sensitivity is a measure of a test's ability to correctly detect the target disease in an individual being tested. A test having poor sensitivity produces a high rate of false negatives, i.e., individuals who have the disease but are falsely identified as being free of that particular disease. The potential danger of a false negative is that the diseased individual will remain undiagnosed and untreated for some period of time, during which the disease may progress to a later stage wherein treatments, if any, may be less effective. An example of a test that has low sensitivity is a protein-based blood test for HIV. This type of test exhibits poor sensitivity because it fails to detect the presence of the virus until the disease is well established and the virus has invaded the bloodstream in substantial numbers. In contrast, an example of a test that has high sensitivity is viral-load detection using the polymerase chain reaction (PCR). High sensitivity is achieved because this type of test can detect very small quantities of the virus. High sensitivity is particularly important when the consequences of missing a diagnosis are high.

[0021] Specificity, on the other hand, is a measure of a test's ability to identify accurately patients who are free of the disease state. A test having poor specificity produces a high rate of false positives, i.e., individuals who are falsely identified as having the disease. A drawback of false positives is that they force patients to undergo unnecessary medical procedures treatments with their attendant risks, emotional and financial stresses, and which could have adverse effects on the patient's health. A feature of diseases which makes it difficult to develop diagnostic tests with high specificity is that disease mechanisms, particularly in cancer, often involve a plurality of genes and proteins. Additionally, certain proteins may be elevated for reasons unrelated to a disease state. n example of a test that has high specificity is a gene-based test that can detect a p53 mutation. Specificity is important when the cost or risk associated with further diagnostic procedures or further medical intervention are very high.

[0022] Pronounced need in the art. It is generally accepted that there is a pronounced need in the art for improved screening and early detection of cancers. As an example, if colon cancer screening specificity can be increased, the problem of false positive test results leading to unnecessary colonoscopic examination would be reduced leading to cost savings and improved safety.

[0023] In view of the incidence of cancers in general and more particularly the disadvantages associated with current colorectal and hepatocelluar cell proliferative disorder screening methods there is a substantial need in the art for improved methods for the early detection of cancer, in particular colon cancer, to be used in addition to or as a substitute for currently available tests.

[0024] Background of the Septin 9 gene. The human Septin 9 gene (also known as MLL septin-like fusion protein, MLL septin-like fusion protein MSF-A, Slpa, Eseptin, Msf, septin-like protein Ovarian/Breast septin (Ov/Br septin) and Septin D1) is located on chromosome 17q25 within contig AC068594.15.1.168501 and is a member of the Septin gene family. FIG. 1 provides the Ensembl annotation of the Septin 9 gene, and shows 4 transcript variants, the Septin 9 variants and the Q9HC74 variants (which are truncated versions of the Septin 9 transcripts). SEQ ID NO: 1 provides the sequence of said gene, comprising regions of both the Septin 9 and Q9HC74 transcripts and promoter regions. SEQ ID NO: 2 and SEQ ID NO: 3 are sub-regions thereof that provide the sequence of CpG rich promoter regions of Septin 9 and Q9HC74 transcripts respectively. SEQ ID NO: 159 provides a particularly preferred CpG island of the Septin 9 gene associated with the gamma variant transcript of the gene and SEQ ID NO: 164 provides a particularly preferred CpG island of the Septin 9 gene associated with the beta variant transcript of the gene. SEQ ID NO: 165 provides the most preferred CpG rich region of the gene and comprises regions associated with the gamma and beta transcript variants. It has been postulated that members of the Septin gene family are associated with multiple cellular functions ranging from vesicle transport to cytokinesis. Disruption of the action of Septin 9 results in incomplete cell division, see Surka, M. C., Tsang, C. W., and Trimble, W. S. Mol Biol Cell, 13: 3532-45 (2002). Septin 9 and other proteins have been shown to be fusion partners of the proto-oncogene MLL suggesting a role in tumorogenesis, see Osaka, M, Rowley, J. D. and Zeleznik-Le, N. J. PNAS, 96:6428-6433 (1999). Burrows et al. reported an in depth study of expression of the multiple isoforms of the Septin 9 gene in ovarian cancer and showed tissue specific expression of various transcripts, see Burrows, J. F., Chanduloy, et al. S.E.H. Journal of Pathology, 201:581-588 (2003). A recent study (post-priority date published prior art) of over 7000 normal and tumor tissues indicates that there is consistent over-expression of Septin 9 isoforms in a number of tumor tissues, see Scott, M., Hyland, P. L., et al. Oncogene, 24: 4688-4700 (2005). The authors speculate that the gene is likely a type II cancer gene where changes in RNA transcript processing control regulation of different protein products, and the levels of these altered protein isoforms may provide answers to the gene's role in malignancy.

[0025] The MSF (migration stimulating factor) protein transcribed from the FN1 gene has also been implicated in carcinogenesis (see WO99/31233), however it should be noted that this protein is not the subject of the present application, and is currently not known to be associated with the Septin 9/MSF gene and transcribed products thereof.

[0026] From the references cited above it can be seen that the biological mechanisms linking said gene to tumorigenesis remain unclear. In WO 200407441 it is claimed that increased copy number and over-expression of the gene is a marker of cancer, and further provides means for diagnosis and treatment thereof according to said observation. WO 200407441 is accordingly the closest prior art as it has the greatest number of features in common with the method and nucleic acids of the present invention, and because it relates to the same field (cancer diagnosis). The major difference between the present invention and that of WO 200407441 is that the present invention shows for the first time that under-expression of the gene Septin 9 is associated with cancer. More particularly this is illustrated by means of methylation analysis. The correlation between expression and DNA methylation, and methods for determining DNA methylation are known in the art (see WO 99/28498). Nonetheless, it would not be obvious to the person skilled in the art that under-expression would be also associated with the development of cancer, in particular as WO 200407441 describes the modulation of said expression to lower levels as a potential therapy for cancer.

### SUMMARY OF THE INVENTION

[0027] The present invention provides a method for detecting and/or classifying cell proliferative disorders in a subject comprising determining the expression levels of Septin 9 in a biological sample isolated from said subject wherein underexpression and/or CpG methylation is indicative of the presence or class of said disorder. Various aspects of the present invention provide an efficient and unique genetic marker, whereby expression analysis of said marker enables the detection of cellular proliferative disorders with a particularly high sensitivity, specificity and/or predictive value. Furthermore, said marker enables the differentiation of neoplastic cellular proliferative disorders (including pre-cancerous conditions) from benign cellular proliferative disorders. The marker of the present invention is particularly suited for detection of colorectal and hepatocellular carcinomas. In the context of colorectal carcinoma the inventive testing methods have particular utility for the screening of at-risk populations. The inventive methods have advantages over prior art methods (including the industry standard FOBT), because of improved sensitivity, specificity and likely patient compliance.

[0028] The methods and nucleic acids of the present invention are most preferably utilised for detecting liver cancer or distinguishing it from other liver cell proliferative disorders or for detecting colorectal carcinoma or pre-cancerous colorectal cell proliferative disorders.

[0029] In one embodiment the invention provides a method for detecting and/or classifying cell proliferative disorders in a subject comprising determining the expression levels of Septin 9 in a biological sample isolated from said subject wherein underexpression and/or CpG methylation is indicative of the presence or class of said disorder. In one embodiment said expression level is determined by detecting the presence, absence or level of mRNA transcribed from said gene. The Septin 9 gene encodes a plurality of mRNA transcript variants, it is preferred that the presence, absence or level of at least one mRNA transcript selected form the group consisting the alpha, epsilon, beta and gamma variants is determined. It is particularly preferred is preferred that the presence, absence or level of the beta and/or gamma variants is determined.

[0030] In a further embodiment said expression level is determined by detecting the presence, absence or level of a polypeptide encoded by said transcript(s).

[0031] In a further preferred embodiment said expression is determined by detecting the presence or absence of CpG methylation within said gene, wherein the presence of methylation indicates the presence of a cell proliferative disorder. Said method comprises the following steps: i) contacting genomic DNA isolated from a biological sample (preferably selected from the group consisting of blood plasma, blood serum, whole blood, isolated blood cells, cells isolated from the blood) obtained from the subject with at least one reagent, or series of reagents that distinguishes between methylated and non-methylated CpG dinucleotides within at least one target region of the genomic DNA, wherein the nucleotide sequence of said target region comprises at least one CpG dinucleotide sequence of the gene Septin 9; and ii) detecting and/or classifying cell proliferative disorders, at least in part. Preferably the target region comprises, or hybridizes under stringent conditions to a sequence of at least 16 contiguous nucleotides of at least one sequence selected from the group consisting of SEQ ID NO: 1 to SEQ ID NO: 3. It is further preferred that the target region comprises, or hybridizes under stringent conditions to a sequence of at least 16 contiguous nucleotides of SEQ ID NO: 159, SEQ ID NO: 164 or most preferably, SEQ ID NO: 165.

[0032] Preferably, the sensitivity of said detection is from about 75% to about 96%, or from about 80% to about 90%, or from about 80% to about 85%. Preferably, the specificity is from about 75% to about 96%, or from about 80% to about 90%, or from about 80% to about 85%.

[0033] The method is novel as no methods currently exist that enable the detection of cancer by analysis of body fluids, with a sensitivity and specificity high enough for use in a commercially available and regulatory body approved assay. For example, current methods used to detect and diagnose colorectal carcinoma include colonoscopy, sigmoidoscopy, and fecal occult blood colon cancer. In comparison to these methods, the disclosed invention is much less invasive than colonoscopy, and as, if not more sensitive than sigmoidoscopy and FOBT. The development of a body fluid assay represents a clear technical advantage over current methods known in the art in that it is anticipated that at least for colorectal carcinoma screening patient compliance for a single body fluid based test will be higher than the triplicate analysis of stool currently recommended for FOBT.

[0034] As a further illustration current methods used to detect and diagnose liver cancers include PET and MRI imaging and cytology screening of aspirate or biopsy.

[0035] Radiological screening methods do not usually detect cancers at early stages and are expensive and time consuming to carry out. Cytological screening presents risks associated with biopsy (internal bleeding) and aspiration (needle-track seeding and hemorrhage, bile peritonitis, and pneumothorax) Accordingly, detection of liver cancer at an early stage is currently not possible, furthermore as patient prognosis is greatly improved by early detection there exists a need in the art for such a screening test.

[0036] A particular embodiment the method comprises the use of the gene Septin 9 or its truncated transcript Q9HC74 as a marker for the detection and distinguishing of cellular proliferative disorders. The present invention is particularly suited for the detection of neoplastic cellular proliferative disorders (including at the pre-neoplastic stage). Furthermore the methods and nucleic acids of the present invention enable the differentiation of malignant from benign cellular proliferative disorders. The methods and nucleic acids of the present invention are particularly effective in the detection of colorectal or liver neoplastic disorders and pre-neoplastic. Furthermore they have utility in differentiating between neoplastic and benign cellular proliferative colorectal and hepatocellular disorders.

[0037] Said use of the gene may be enabled by means of any analysis of the expression of the gene, by means of mRNA expression analysis or protein expression analysis. However, in the most preferred embodiment of the invention, the detection, differentiation and distinguishing of colorectal or liver cell proliferative disorders is enabled by means of analysis of the methylation status of the gene Septin 9 or its truncated transcript Q9HC74, and its promoter or regulatory elements.

[0038] The invention provides a method for the analysis of biological samples for features associated with the development of cellular proliferative disorders, the method characterised in that at least one nucleic acid, or a fragment thereof, from the group consisting of SEQ ID NO: 1 to SEQ ID NO: 3 is contacted with a reagent or series of reagents capable of distinguishing between methylated and non methylated CpG dinucleotides within the genomic sequence, or sequences of interest. Particularly preferred is a method characterised in that at least one nucleic acid, or a fragment thereof of SEQ ID NO: 159, SEQ ID NO: 164 or most preferably, SEQ ID NO: 165 is contacted with a reagent or series of reagents capable of distinguishing between methylated and non methylated CpG dinucleotides within the genomic sequence, or sequences of interest.

[0039] The present invention provides a method for ascertaining epigenetic parameters of genomic DNA associated with the development of neoplastic cellular proliferative disorders (e.g. cancers). The method has utility for the improved diagnosis, treatment and monitoring of said diseases.

[0040] Preferably, the source of the test sample is selected from the group consisting of cells or cell lines, histological slides, biopsies, paraffin-embedded tissue, body fluids, ejaculate, stool, urine, blood, and combinations thereof. More preferably, the source is selected from the group consisting of stool, blood plasma, blood serum, whole blood, isolated blood cells, cells isolated from the blood obtained from the subject.

[0041] Specifically, the present invention provides a method for detecting neoplastic cellular proliferative disorders (preferably colorectal and/or liver cell) including at the early pre-cancerous stage, and for differentiating between neoplastic and benign cellular proliferative disorders, comprising: obtaining a biological sample comprising genomic nucleic acid(s); contacting the nucleic acid(s), or a fragment thereof, with one reagent or a plurality of reagents sufficient for distinguishing between methylated and non methylated CpG dinucleotide sequences within a target sequence of the subject nucleic acid, wherein the target sequence comprises, or hybridises under stringent conditions to, a sequence comprising at least 16 contiguous nucleotides of SEQ ID NO: 1 or more preferably SEQ ID NO: 2 or SEQ ID NO: 3, said contiguous nucleotides comprising at least one CpG dinucleotide sequence; and determining, based at least in part on said distinguishing, the methylation state of at least one target CpG dinucleotide sequence, or an average, or a value reflecting an average methylation state of a plurality of target CpG dinucleotide sequences. In a further preferred embodiment of the invention the target sequence comprises, or hybridises under stringent conditions to, a sequence comprising at least 16 contiguous nucleotides of SEQ ID NO: 159, SEQ ID NO: 164 or most preferably, SEQ ID NO: 165.

[0042] Preferably, distinguishing between methylated and non methylated CpG dinucleotide sequences within the target sequence comprises methylation state-dependent conversion or non-conversion of at least one such CpG dinucleotide sequence to the corresponding converted or non-converted dinucleotide sequence within a sequence selected from the group consisting of SEQ ID NO: 4 to SEQ ID NO: 15, and contiguous regions thereof corresponding to the target sequence. It is further preferred that said sequence is selected from the group consisting of SEQ ID NO; 160 to SEQ ID NO: 163; SEQ ID NO; 166 to SEQ ID NO: 173, and contiguous regions thereof corresponding to the target sequence.

[0043] Additional embodiments provide a method for the detection of neoplastic cellular proliferative disorders (or distinguishing them from benign cellular proliferative disorders), most preferably colorectal or hepatocellular, comprising: obtaining a biological sample having subject genomic DNA; extracting the genomic DNA; treating the genomic DNA, or a fragment thereof, with one or more reagents to convert 5-position unmethylated cytosine bases to uracil or to another base that is detectably dissimilar to cytosine in terms of hybridization properties; contacting the treated genomic DNA, or the treated fragment thereof, with an amplification enzyme and at least two primers comprising, in each case a contiguous sequence at least 9 nucleotides in length that is complementary to, or hybridizes under moderately stringent or stringent conditions to a sequence selected from the group consisting SEQ ID NO: 4 to SEQ ID NO: 15 or more preferably SEQ ID NO; 160 to SEQ ID NO: 163; SEQ ID NO; 166 to SEQ ID NO: 173, and complements thereof, wherein the treated DNA or the fragment thereof is either amplified to produce an amplificate, or is not amplified; and determining, based on a presence or absence of, or on a property of said amplificate, the methylation state or an average, or a value reflecting an average of the methylation level of at least one, but more preferably a plurality of CpG dinucleotides of a sequence selected from the group consisting of SEQ ID NO: 1 to SEQ ID NO: 3, or more preferably SEQ ID NO: 159, SEQ ID NO: 164 or most preferably, SEQ ID NO: 165.

[0044] Preferably, determining comprises use of at least one method selected from the group consisting of: I) hybridizing at least one nucleic acid molecule comprising a contiguous sequence at least 9 nucleotides in length that is complementary to, or hybridizes under moderately stringent or stringent conditions to a sequence selected from the group consisting of SEQ ID NO: 4 to SEQ ID NO: 15 or more preferably SEQ ID NO; 160 to SEQ ID NO: 163; SEQ ID NO; 166 to SEQ ID NO: 173, and complements thereof; ii) hybridizing at least one nucleic acid molecule, bound to a solid phase, comprising a contiguous sequence at least 9 nucleotides in length that is complementary to, or hybridizes under moderately stringent or stringent conditions to a sequence selected from the group consisting of SEQ ID NO: 4 to SEQ ID NO: 15 or more preferably SEQ ID NO; 160 to SEQ ID NO: 163; SEQ ID NO; 166 to SEQ ID NO: 173, and complements thereof; iii) hybridizing at least one nucleic acid molecule comprising a contiguous sequence at least 9 nucleotides in length that is complementary to, or hybridizes under moderately stringent or stringent conditions to a sequence selected from the group consisting of SEQ ID NO: 4 to SEQ ID NO: 15 or more preferably SEQ ID NO; 160 to SEQ ID NO: 163; SEQ ID NO; 166 to SEQ ID NO: 173, and complements thereof, and extending at least one such hybridized nucleic acid molecule by at least one nucleotide base; and iv) sequencing of the amplificate.

[0045] Further embodiments provide a method for the analysis (i.e. detection and/or classification) of cell proliferative disorders, comprising: obtaining a biological sample having subject genomic DNA; extracting the genomic DNA; contacting the genomic DNA, or a fragment thereof, comprising one or more sequences selected from the group consisting of SEQ ID NO: 1 to SEQ ID NO: 3 or more preferably SEQ ID NO: 159, SEQ ID NO: 164 or most preferably, SEQ ID NO: 165 or a sequence that hybridizes under stringent conditions thereto, with one or more methylation-sensitive restriction enzymes, wherein the genomic DNA is either digested thereby to produce digestion fragments, or is not digested thereby; and determining, based on a presence or absence of, or on property of at least one such fragment, the methylation state of at least one CpG dinucleotide sequence of SEQ ID NO: 1 or more preferably SEQ ID NO: 159 or SEQ ID NO: 164 or most preferably, SEQ ID NO: 165 or an average, or a value reflecting an average methylation state of a plurality of CpG dinucleotide sequences thereof. Preferably, the digested or undigested genomic DNA is amplified prior to said determining.

[0046] Additional embodiments provide novel genomic and chemically modified nucleic acid sequences, as well as oligonucleotides and/or PNA-oligomers for analysis of cytosine methylation patterns within sequences from the group consisting of SEQ ID NO: 1 to SEQ ID NO: 3 or more preferably SEQ ID NO: 159 or SEQ ID NO: 164 or most preferably, SEQ ID NO: 165.

### BRIEF DESCRIPTION OF THE DRAWINGS

[0047] FIG. 1 shows the Ensembl human genome v31.35d (8 Jul. 2005) annotation of the Septin 9 and Q9HC74 gene transcripts. The relative locations of SEQ ID NO: 2 and SEQ ID NO: 3 are also shown.

[0048] FIG. 2 provides three plots. The two plots on the left show the sensitivity of the assay of SEQ ID NO: 1 (Assay 2) in colorectal carcinoma and blood samples in Example 2. The plot to the right provides a ROC of the colorectal carcinoma detection.

[0049] FIG. 3 shows the methylation levels measured in other cancers according to Example 4.

[0050] FIG. 4 shows the methylation levels measured in other non-cancerous diseases, according to Example 4.

[0051] FIGS. 5 to 29 provide matrices of the bisulfite sequencing data according to Example 5. Each column of the matrices represents the sequencing data for a replicate of one sample, all replicates of each sample are grouped together in one block. Each row of a matrix represents a single CpG site within the fragment. The CpG number of the amplificate is shown to the left of the matrices.

[0052] The amount of measured methylation at each CpG position is represented by colour from light grey (0% methylation), to medium grey (50% methylation) to dark grey (100% methylation). Some amplificates, samples or CpG positions were not successfully sequenced and these are shown in white.

[0053] FIGS. 5 to 12 provide an overview of the sequencing of the bisulfite converted amplificates of the genomic sequence according to Table 21 in 4 samples that had previously been quantified (by HeavyMethyl assay) as having between 10% and 20% methylation.

[0054] FIGS. 13 to 20 provide an overview of the sequencing of the bisulfite converted amplificate of the genomic sequence according to Table 21 in 2 samples that had previously been quantified (by HeavyMethyl assay) as having greater than 20% methylation.

[0055] FIGS. 21 to 22 provide an overview of the sequencing of the bisulfite converted amplificate of the genomic sequence according to Table 21 in blood samples from 3 healthy subjects.

[0056] FIGS. 23 to 29 provide an overview of the sequencing of the bisulfite converted amplificate of the genomic sequence according to Table 21 in 6 samples that had previously been quantified (by HeavyMethyl assay) as having less than 10% (but greater than 0%) methylation.

[0057] FIGS. 30 to 38 provide an overview of the sequencing of the bisulfite converted amplificate of the genomic sequence according to Table 21. Samples are separated into blocks according to level of HM quantified methylation, and also showing the level of methylation in normal whole blood (“NWB”).

### DETAILED DESCRIPTION OF THE INVENTION

### Definitions

[0058] The term “Observed/Expected Ratio” (“O/E Ratio”) refers to the frequency of CpG dinucleotides within a particular DNA sequence, and corresponds to the [number of CpG sites/(number of C bases×number of G bases)]/band length for each fragment.

[0059] The term “CpG island” refers to a contiguous region of genomic DNA that satisfies the criteria of (1) having a frequency of CpG dinucleotides corresponding to an “Observed/Expected Ratio”>0.6, and (2) having a “GC Content”>0.5. CpG islands are typically, but not always, between about 0.2 to about 1 KB, or to about 2 kb in length.

[0060] The term “methylation state” or “methylation status” refers to the presence or absence of 5-methylcytosine (“5-mCyt”) at one or a plurality of CpG dinucleotides within a DNA sequence. Methylation states at one or more particular CpG methylation sites (each having two CpG dinucleotide sequences) within a DNA sequence include “unmethylated,” “fully-methylated” and “hemi-methylated.”

[0061] The term “hemi-methylation” or “hemimethylation” refers to the methylation state of a double stranded DNA wherein only one strand thereof is methylated. The term ‘AUC’ as used herein is an abbreviation for the area under a curve.

[0062] In particular it refers to the area under a Receiver Operating Characteristic (ROC) curve. The ROC curve is a plot of the true positive rate against the false positive rate for the different possible cut points of a diagnostic test. It shows the trade-off between sensitivity and specificity depending on the selected cut point (any increase in sensitivity will be accompanied by a decrease in specificity). The area under an ROC curve (AUC) is a measure for the accuracy of a diagnostic test (the larger the area the better, optimum is 1, a random test would have a ROC curve lying on the diagonal with an area of 0.5; for reference: J. P. Egan. Signal Detection Theory and ROC Analysis, Academic Press, New York, 1975).

[0063] The term “hypermethylation” refers to the average methylation state corresponding to an increased presence of 5-mCyt at one or a plurality of CpG dinucleotides within a DNA sequence of a test DNA sample, relative to the amount of 5-mCyt found at corresponding CpG dinucleotides within a normal control DNA sample.

[0064] The term “hypomethylation” refers to the average methylation state corresponding to a decreased presence of 5-mCyt at one or a plurality of CpG dinucleotides within a DNA sequence of a test DNA sample, relative to the amount of 5-mCyt found at corresponding CpG dinucleotides within a normal control DNA sample.

[0065] The term “microarray” refers broadly to both “DNA microarrays,” and ‘DNA chip(s),’ as recognized in the art, encompasses all art-recognized solid supports, and encompasses all methods for affixing nucleic acid molecules thereto or synthesis of nucleic acids thereon.

[0066] “Genetic parameters” are mutations and polymorphisms of genes and sequences further required for their regulation. To be designated as mutations are, in particular, insertions, deletions, point mutations, inversions and polymorphisms and, particularly preferred, SNPs (single nucleotide polymorphisms).

[0067] “Epigenetic parameters” are, in particular, cytosine methylation. Further epigenetic parameters include, for example, the acetylation of histones which, however, cannot be directly analysed using the described method but which, in turn, correlate with the DNA methylation.

[0068] The term “bisulfite reagent” refers to a reagent comprising bisulfite, disulfite, hydrogen sulfite or combinations thereof, useful as disclosed herein to distinguish between methylated and unmethylated CpG dinucleotide sequences.

[0069] The term “Methylation assay” refers to any assay for determining the methylation state of one or more CpG dinucleotide sequences within a sequence of DNA.

[0070] The term “MS.AP-PCR” (Methylation-Sensitive Arbitrarily-Primed Polymerase Chain Reaction) refers to the art-recognized technology that allows for a global scan of the genome using CG-rich primers to focus on the regions most likely to contain CpG dinucleotides, and described by Gonzalgo et al., Cancer Research 57:594-599, 1997.

[0071] The term “MethyLight™” refers to the art-recognized fluorescence-based real-time PCR technique described by Eads et al., Cancer Res. 59:2302-2306, 1999.

[0072] The term “HeavyMethyl™” assay, in the embodiment thereof implemented herein, refers to an assay, wherein methylation specific blocking probes (also referred to herein as blockers) covering CpG positions between, or covered by the amplification primers enable methylation-specific selective amplification of a nucleic acid sample.

[0073] The term “HeavyMethyl™ MethyLight™” assay, in the embodiment thereof implemented herein, refers to a HeavyMethyl™ MethyLight™ assay, which is a variation of the MethyLight™ assay, wherein the MethyLight™ assay is combined with methylation specific blocking probes covering CpG positions between the amplification primers.

[0074] The term “Ms-SNuPE” (Methylation-sensitive Single Nucleotide Primer Extension) refers to the art-recognized assay described by Gonzalgo & Jones, Nucleic Acids Res. 25:2529-2531, 1997.

[0075] The term “MSP” (Methylation-specific PCR) refers to the art-recognized methylation assay described by Herman et al. Proc. Natl. Acad. Sci. USA 93:9821-9826, 1996, and by U.S. Pat. No. 5,786,146.

[0076] The term “COBRA” (Combined Bisulfite Restriction Analysis) refers to the art-recognized methylation assay described by Xiong & Laird, Nucleic Acids Res. 25:2532-2534, 1997.

[0077] The term “MCA” (Methylated CpG Island Amplification) refers to the methylation assay described by Toyota et al., Cancer Res. 59:2307-12, 1999, and in WO 00/26401A1.

[0078] The term “hybridisation” is to be understood as a bond of an oligonucleotide to a complementary sequence along the lines of the Watson-Crick base pairings in the sample DNA, forming a duplex structure.

[0079] “Stringent hybridisation conditions,” as defined herein, involve hybridising at 68° C. in 5×SSC/5×Denhardt's solution/1.0% SDS, and washing in 0.2×SSC/0.1% SDS at room temperature, or involve the art-recognized equivalent thereof (e.g., conditions in which a hybridisation is carried out at 60° C. in 2.5×SSC buffer, followed by several washing steps at 37° C. in a low buffer concentration, and remains stable). Moderately stringent conditions, as defined herein, involve including washing in 3×SSC at 42° C., or the art-recognized equivalent thereof. The parameters of salt concentration and temperature can be varied to achieve the optimal level of identity between the probe and the target nucleic acid. Guidance regarding such conditions is available in the art, for example, by Sambrook et al., 1989, Molecular Cloning, A Laboratory Manual, Cold Spring Harbor Press, N.Y.; and Ausubel et al. (eds.), 1995, Current Protocols in Molecular Biology, (John Wiley & Sons, N.Y.) at Unit 2.10.

[0080] The terms “Methylation-specific restriction enzymes” or “methylation-sensitive restriction enzymes” shall be taken to mean an enzyme that selectively digests a nucleic acid dependant on the methylation state of its recognition site. In the case of such restriction enzymes which specifically cut if the recognition site is not methylated or hemimethylated, the cut will not take place, or with a significantly reduced efficiency, if the recognition site is methylated. In the case of such restriction enzymes which specifically cut if the recognition site is methylated, the cut will not take place, or with a significantly reduced efficiency if the recognition site is not methylated. Preferred are methylation-specific restriction enzymes, the recognition sequence of which contains a CG dinucleotide (for instance cgcg or cccggg). Further preferred for some embodiments are restriction enzymes that do not cut if the cytosine in this dinucleotide is methylated at the carbon atom C5. “Non-methylation-specific restriction enzymes” or “non-methylation-sensitive restriction enzymes” are restriction enzymes that cut a nucleic acid sequence irrespective of the methylation state with nearly identical efficiency. They are also called “methylation-unspecific restriction enzymes.”

[0081] The term “Septin 9” shall be taken to include all transcript variants thereof (including for example its truncated transcript Q9HC74) and all promoter and regulatory elements thereof. Furthermore as a plurality of SNPs are known within said gene the term shall be taken to include all sequence variants thereof.

[0082] The term “pre-cancerous” or “pre-neoplastic” and equivalents thereof shall be taken to mean any cellular proliferative disorder which is undergoing malignant transformation. Examples of such conditions include, in the context of colorectal cellular proliferative disorders, cellular proliferative disorders with a high degree of dysplasia and the following classes of adenomas:

[0083] Level 1: penetration of malignant glands through the muscularis mucosa into the submucosa, within the polyp head

[0084] Level 2: the same submucosal invasion, but present at the junction of the head to the stalk

[0085] Level 3: invasion of the stalk

[0086] Level 4: invasion of the stalk's base at the connection to the colonic wall (this level corresponds to stage Dukes A)

### Overview:

[0087] The present invention provides a method for detecting and/or classifying cell proliferative disorders in a subject comprising determining the expression levels of Septin 9 in a biological sample isolated from said subject wherein underexpression and/or CpG methylation is indicative of the presence or class of said disorder. Said markers may be used for the diagnosis of neoplastic cellular proliferative disorders (cancer), including early detection during the pre-cancerous stages of the disease, and furthermore for the differentiation of neoplastic from benign cellular proliferative disorders. The present invention discloses a method wherein a neoplastic cell proliferative disorder is distinguished from a benign cell proliferative disorder said method characterized in that underexpression and/or the presence of CpG methylation is indicative of the presence of a neoplastic cell proliferative disorder or pre-neoplastic disorder and the absence thereof is indicative of the presence of a benign cell proliferative disorder.

[0088] The markers of the present invention are particularly efficient in detecting or distinguishing between liver cell proliferative disorders or alternatively for detecting or distinguishing between colorectal cell proliferative disorders, thereby providing improved means for the early detection, classification and treatment of said disorders.

[0089] In addition to the embodiments above wherein the methylation analysis of the gene Septin 9 or its truncated transcript Q9HC74 is analysed, the invention presents further panels of genes comprising Septin 9 or its truncated transcript Q9HC74 with novel utility for the detection of cancers, in particular liver and/or colorectal cancer.

[0090] In a first further embodiment the present invention is based upon the analysis of CpG methylaton status of the gene Septin 9 or its truncated transcript Q9HC74 and one or more genes taken from the group consisting of Septin 9, Q9HC74, FOXL2, NGFR, TMEFF2, SIX6, SARM1, VTN and ZDHHC22 according to Table 1 and/or their regulatory sequences.

[0091] It is further preferred that the sequences of said genes are as according to Table 1.

[0092] Bisulfite modification of DNA is an art-recognized tool used to assess CpG methylation status. 5-methylcytosine is the most frequent covalent base modification in the DNA of eukaryotic cells. It plays a role, for example, in the regulation of the transcription, in genetic imprinting, and in tumorigenesis. Therefore, the identification of 5-methylcytosine as a component of genetic information is of considerable interest. However, 5-methylcytosine positions cannot be identified by sequencing, because 5-methylcytosine has the same base pairing behavior as cytosine. Moreover, the epigenetic information carried by 5-methylcytosine is completely lost during, e.g., PCR amplification.

[0093] The most frequently used method for analyzing DNA for the presence of 5-methylcytosine is based upon the specific reaction of bisulfite with cytosine whereby, upon subsequent alkaline hydrolysis, cytosine is converted to uracil which corresponds to thymine in its base pairing behavior. Significantly, however, 5-methylcytosine remains unmodified under these conditions. Consequently, the original DNA is converted in such a manner that methylcytosine, which originally could not be distinguished from cytosine by its hybridization behavior, can now be detected as the only remaining cytosine using standard, art-recognized molecular biological techniques, for example, by amplification and hybridization, or by sequencing. All of these techniques are based on differential base pairing properties, which can now be fully exploited.

[0094] The prior art, in terms of sensitivity, is defined by a method comprising enclosing the DNA to be analysed in an agarose matrix, thereby preventing the diffusion and renaturation of the DNA (bisulfite only reacts with single-stranded DNA), and replacing all precipitation and purification steps with fast dialysis (Olek A, et al., A modified and improved method for bisulfite based cytosine methylation analysis, Nucleic Acids Res. 24:5064-6, 1996). It is thus possible to analyse individual cells for methylation status, illustrating the utility and sensitivity of the method. An overview of art-recognized methods for detecting 5-methylcytosine is provided by Rein, T., et al., Nucleic Acids Res., 26:2255, 1998.

[0095] The bisulfite technique, barring few exceptions (e.g., Zeschnigk M, et al., Eur J Hum Genet. 5:94-98, 1997), is currently only used in research. In all instances, short, specific fragments of a known gene are amplified subsequent to a bisulfite treatment, and either completely sequenced (Olek & Walter, Nat Genet. 1997 17:275-6, 1997), subjected to one or more primer extension reactions (Gonzalgo & Jones, Nucleic Acids Res., 25:2529-31, 1997; WO 95/00669; U.S. Pat. No. 6,251,594) to analyse individual cytosine positions, or treated by enzymatic digestion (Xiong & Laird, Nucleic Acids Res., 25:2532-4, 1997). Detection by hybridisation has also been described in the art (Olek et al., WO 99/28498). Additionally, use of the bisulfite technique for methylation detection with respect to individual genes has been described (Grigg & Clark, Bioessays, 16:431-6, 1994; Zeschnigk M, et al., Hum Mol Genet., 6:387-95, 1997; Feil R, et al., Nucleic Acids Res., 22:695-, 1994; Martin V, et al., Gene, 157:261-4, 1995; WO 9746705 and WO 9515373).

[0096] The present invention provides for the use of the bisulfite technique, in combination with one or more methylation assays, for determination of the methylation status of CpG dinucleotide sequences within SEQ ID NO: 1 or more preferably SEQ ID NO: 159 or SEQ ID NO: 164 or most preferably, SEQ ID NO: 165. Genomic CpG dinucleotides can be methylated or unmethylated (alternatively known as up- and down-methylated respectively). However the methods of the present invention are suitable for the analysis of biological samples of a heterogeneous nature e.g. a low concentration of tumor cells within a background of blood or stool. Accordingly, when analyzing the methylation status of a CpG position within such a sample the person skilled in the art may use a quantitative assay for determining the level (e.g. percent, fraction, ratio, proportion or degree) of methylation at a particular CpG position as opposed to a methylation state. Accordingly the term methylation status or methylation state should also be taken to mean a value reflecting the degree of methylation at a CpG position. Unless specifically stated the terms “hypermethylated” or “upmethylated” shall be taken to mean a methylation level above that of a specified cut-off point, wherein said cut-off may be a value representing the average or median methylation level for a given population, or is preferably an optimized cut-off level. The “cut-off” is also referred herein as a “threshold”. In the context of the present invention the terms “methylated”, “hypermethylated” or “upmethylated” shall be taken to include a methylation level above the cut-off be zero (0) % (or equivalents thereof) methylation for all CpG positions within and associated with (e.g. in promoter or regulatory regions) the Septin 9 gene.

[0097] According to the present invention, determination of the methylation status of CpG dinucleotide sequences within SEQ ID NO: 1 has utility both in the diagnosis and characterization of cellular proliferative disorders. In preferred embodiments the methylation status of CpG positions within SEQ ID NO: 2 and SEQ ID NO: 3 are determined, SEQ ID NO: 2 and SEQ ID NO: 3 are particularly preferred regions of SEQ ID NO: 1 (i.e. SEQ ID NO: 1 comprises both SEQ ID NO: 2 and SEQ ID NO: 3). In the most preferred embodiment the methylation status of CpG positions within SEQ ID NO: 159 or SEQ ID NO: 164 or most preferably, SEQ ID NO: 165 are determined. SEQ ID NO: 165 provides the sequence of a particularly preferred CpG rich region of the gene Septin 9 as provided in SEQ ID NO: 1 and SEQ ID NO: 3 which comprises CpG dense regions associated with the gamma and beta transcript variants thereof. SEQ ID NO: 159 provides a CpG dense region associated with the gamma variant transcript and SEQ ID NO: 164 provides a CpG dense region associated with the beta variant. The analysis of CpG positions within SEQ ID NO: 159 or SEQ ID NO: 164 or most preferably within SEQ ID NO: 165 is particularly preferred for the methods and kits of the present invention due to the high degree of co-methylation within this specific CpG rich region of the Septin 9 gene as compared to other CpG rich regions. Determination of the methylation status of CpG dinucleotide sequences within SEQ ID NO: 2, SEQ ID NO: 3 and SEQ ID NO: 159 or SEQ ID NO: 164 or most preferably, SEQ ID NO: 165 also have utility in the diagnosis and characterization of cellular proliferative disorders.

[0098] Methylation Assay Procedures. Various methylation assay procedures are known in the art, and can be used in conjunction with the present invention. These assays allow for determination of the methylation state of one or a plurality of CpG dinucleotides (e.g., CpG islands) within a DNA sequence. Such assays involve, among other techniques, DNA sequencing of bisulfite-treated DNA, PCR (for sequence-specific amplification), Southern blot analysis, and use of methylation-sensitive restriction enzymes.

[0099] For example, genomic sequencing has been simplified for analysis of DNA methylation patterns and 5-methylcytosine distribution by using bisulfite treatment (Frommer et al., Proc. Natl. Acad. Sci. USA 89:1827-1831, 1992). Additionally, restriction enzyme digestion of PCR products amplified from bisulfite-converted DNA is used, e.g., the method described by Sadri & Hornsby (Nucl. Acids Res. 24:5058-5059, 1996), or COBRA (Combined Bisulfite Restriction Analysis) (Xiong & Laird, Nucleic Acids Res. 25:2532-2534, 1997).

[0100] COBRA. COBRA™ analysis is a quantitative methylation assay useful for determining DNA methylation levels at specific gene loci in small amounts of genomic DNA (Xiong & Laird, Nucleic Acids Res. 25:2532-2534, 1997). Briefly, restriction enzyme digestion is used to reveal methylation-dependent sequence differences in PCR products of sodium bisulfite-treated DNA. Methylation-dependent sequence differences are first introduced into the genomic DNA by standard bisulfite treatment according to the procedure described by Frommer et al. (Proc. Natl. Acad. Sci. USA 89:1827-1831, 1992). PCR amplification of the bisulfite converted DNA is then performed using primers specific for the CpG islands of interest, followed by restriction endonuclease digestion, gel electrophoresis, and detection using specific, labeled hybridization probes. Methylation levels in the original DNA sample are represented by the relative amounts of digested and undigested PCR product in a linearly quantitative fashion across a wide spectrum of DNA methylation levels. In addition, this technique can be reliably applied to DNA obtained from microdissected paraffin-embedded tissue samples.

[0101] Typical reagents (e.g., as might be found in a typical COBRA™-based kit) for COBRA™ analysis may include, but are not limited to: PCR primers for specific gene (or bisulfite treated DNA sequence or CpG island); restriction enzyme and appropriate buffer; gene-hybridization oligonucleotide; control hybridization oligonucleotide; kinase labeling kit for oligonucleotide probe; and labeled nucleotides. Additionally, bisulfite conversion reagents may include: DNA denaturation buffer; sulfonation buffer; DNA recovery reagents or kits (e.g., precipitation, ultrafiltration, affinity column); desulfonation buffer; and DNA recovery components.

[0102] Preferably, assays such as “MethyLight™” (a fluorescence-based real-time PCR technique) (Eads et al., Cancer Res. 59:2302-2306, 1999), Ms-SNuPE™ (Methylation-sensitive Single Nucleotide Primer Extension) reactions (Gonzalgo & Jones, Nucleic Acids Res. 25:2529-2531, 1997), methylation-specific PCR (“MSP”; Herman et al., Proc. Natl. Acad. Sci. USA 93:9821-9826, 1996; U.S. Pat. No. 5,786,146), and methylated CpG island amplification (“MCA”; Toyota et al., Cancer Res. 59:2307-12, 1999) are used alone or in combination with other of these methods.

[0103] The “HeavyMethyl™” assay, technique is a quantitative method for assessing methylation differences based on methylation specific amplification of bisulfite treated DNA. Methylation specific blocking probes (also referred to herein as blockers) covering CpG positions between, or covered by the amplification primers enable methylation-specific selective amplification of a nucleic acid sample.

[0104] The term “HeavyMethyl™ MethyLight™” assay, in the embodiment thereof implemented herein, refers to a HeavyMethyl™ MethyLight™ assay, which is a variation of the MethyLight™ assay, wherein the MethyLight™ assay is combined with methylation specific blocking probes covering CpG positions between the amplification primers. The HeavyMethyl™ assay may also be used in combination with methylation specific amplification primers.

[0105] Typical reagents (e.g., as might be found in a typical MethyLight™-based kit) for HeavyMethyl™ analysis may include, but are not limited to: PCR primers for specific genes (or bisulfite treated DNA sequence or CpG island); blocking oligonucleotides; optimized PCR buffers and deoxynucleotides; and Taq polymerase.

[0106] MSP. MSP (methylation-specific PCR) allows for assessing the methylation status of virtually any group of CpG sites within a CpG island, independent of the use of methylation-sensitive restriction enzymes (Herman et al. Proc. Natl. Acad. Sci. USA 93:9821-9826, 1996; U.S. Pat. No. 5,786,146). Briefly, DNA is modified by sodium bisulfite converting all unmethylated, but not methylated cytosines to uracil, and subsequently amplified with primers specific for methylated versus unmethylated DNA. MSP requires only small quantities of DNA, is sensitive to 0.1% methylated alleles of a given CpG island locus, and can be performed on DNA extracted from paraffin-embedded samples. Typical reagents (e.g., as might be found in a typical MSP-based kit) for MSP analysis may include, but are not limited to: methylated and unmethylated PCR primers for specific gene (or bisulfite treated DNA sequence or CpG island), optimized PCR buffers and deoxynucleotides, and specific probes.

[0107] MethyLight™. The MethyLight™ assay is a high-throughput quantitative methylation assay that utilizes fluorescence-based real-time PCR (TaqMan™) technology that requires no further manipulations after the PCR step (Eads et al., Cancer Res. 59:2302-2306, 1999). Briefly, the MethyLight™ process begins with a mixed sample of genomic DNA that is converted, in a sodium bisulfite reaction, to a mixed pool of methylation-dependent sequence differences according to standard procedures (the bisulfite process converts unmethylated cytosine residues to uracil). Fluorescence-based PCR is then performed in a “biased” (with PCR primers that overlap known CpG dinucleotides) reaction. Sequence discrimination can occur both at the level of the amplification process and at the level of the fluorescence detection process.

[0108] The MethyLight™ assay may be used as a quantitative test for methylation patterns in the genomic DNA sample, wherein sequence discrimination occurs at the level of probe hybridization. In this quantitative version, the PCR reaction provides for a methylation specific amplification in the presence of a fluorescent probe that overlaps a particular putative methylation site. An unbiased control for the amount of input DNA is provided by a reaction in which neither the primers, nor the probe overlie any CpG dinucleotides. Alternatively, a qualitative test for genomic methylation is achieved by probing of the biased PCR pool with either control oligonucleotides that do not “cover” known methylation sites (a fluorescence-based version of the HeavyMethyl™ and MSP techniques), or with oligonucleotides covering potential methylation sites.

[0109] The MethyLight™ process can by used with any suitable probes e.g. “TaqMan®”, Lightcycler® etc. . . . For example, double-stranded genomic DNA is treated with sodium bisulfite and subjected to one of two sets of PCR reactions using TaqMan® probes; e.g., with MSP primers and/or HeavyMethyl blocker oligonucleotides and TaqMan® probe. The TaqMan® probe is dual-labeled with fluorescent “reporter” and “quencher” molecules, and is designed to be specific for a relatively high GC content region so that it melts out at about 10° C. higher temperature in the PCR cycle than the forward or reverse primers. This allows the TaqMan® probe to remain fully hybridized during the PCR annealing/extension step. As the Taq polymerase enzymatically synthesizes a new strand during PCR, it will eventually reach the annealed TaqMan® probe. The Taq polymerase 5′ to 3′ endonuclease activity will then displace the TaqMan® probe by digesting it to release the fluorescent reporter molecule for quantitative detection of its now unquenched signal using a real-time fluorescent detection system.

[0110] Typical reagents (e.g., as might be found in a typical MethyLight™-based kit) for MethyLight™ analysis may include, but are not limited to: PCR primers for specific gene (or bisulfite treated DNA sequence or CpG island); TaqMan® or Lightcycler® probes; optimized PCR buffers and deoxynucleotides; and Taq polymerase.

[0111] The QM™ (quantitative methylation) assay is an alternative quantitative test for methylation patterns in genomic DNA samples, wherein sequence discrimination occurs at the level of probe hybridization. In this quantitative version, the PCR reaction provides for unbiased amplification in the presence of a fluorescent probe that overlaps a particular putative methylation site. An unbiased control for the amount of input DNA is provided by a reaction in which neither the primers, nor the probe overlie any CpG dinucleotides. Alternatively, a qualitative test for genomic methylation is achieved by probing of the biased PCR pool with either control oligonucleotides that do not “cover” known methylation sites (a fluorescence-based version of the HeavyMethyl™ and MSP techniques), or with oligonucleotides covering potential methylation sites.

[0112] The QM™ process can by used with any suitable probes e.g. “TaqMan®”, Lightcycler® etc. . . . in the amplification process. For example, double-stranded genomic DNA is treated with sodium bisulfite and subjected to unbiased primers and the TaqMan® probe. The TaqMan® probe is dual-labeled with fluorescent “reporter” and “quencher” molecules, and is designed to be specific for a relatively high GC content region so that it melts out at about 10° C. higher temperature in the PCR cycle than the forward or reverse primers. This allows the TaqMan® probe to remain fully hybridized during the PCR annealing/extension step. As the Taq polymerase enzymatically synthesizes a new strand during PCR, it will eventually reach the annealed TaqMan® probe. The Taq polymerase 5′ to 3′ endonuclease activity will then displace the TaqMan® probe by digesting it to release the fluorescent reporter molecule for quantitative detection of its now unquenched signal using a real-time fluorescent detection system.

[0113] Typical reagents (e.g., as might be found in a typical QM™-based kit) for QM™ analysis may include, but are not limited to: PCR primers for specific gene (or bisulfite treated DNA sequence or CpG island); TaqMan® or Lightcycler® probes; optimized PCR buffers and deoxynucleotides; and Taq polymerase.

[0114] Ms-SNuPE. The Ms-SNuPE™ technique is a quantitative method for assessing methylation differences at specific CpG sites based on bisulfite treatment of DNA, followed by single-nucleotide primer extension (Gonzalgo & Jones, Nucleic Acids Res. 25:2529-2531, 1997). Briefly, genomic DNA is reacted with sodium bisulfite to convert unmethylated cytosine to uracil while leaving 5-methylcytosine unchanged. Amplification of the desired target sequence is then performed using PCR primers specific for bisulfite-converted DNA, and the resulting product is isolated and used as a template for methylation analysis at the CpG site(s) of interest. Small amounts of DNA can be analyzed (e.g., microdissected pathology sections), and it avoids utilization of restriction enzymes for determining the methylation status at CpG sites.

[0115] Typical reagents (e.g., as might be found in a typical Ms-SNuPE™-based kit) for Ms-SNuPE™ analysis may include, but are not limited to: PCR primers for specific gene (or bisulfite treated DNA sequence or CpG island); optimized PCR buffers and deoxynucleotides; gel extraction kit; positive control primers; Ms-SNuPE™ primers for specific gene; reaction buffer (for the Ms-SNuPE reaction); and labelled nucleotides. Additionally, bisulfite conversion reagents may include: DNA denaturation buffer; sulfonation buffer; DNA recovery regents or kit (e.g., precipitation, ultrafiltration, affinity column); desulfonation buffer; and DNA recovery components.

The Genomic Sequence According to SEQ ID NO: 1 to SEQ ID NO: 3 and SEQ ID NO: 159 or SEQ ID NO: 164 or Most Preferably, SEQ ID NO: 165, and Non-naturally Occurring Treated Variants Thereof According to SEQ ID NO: 4 TO SEQ ID NO: 15 and SEQ ID NO; 160 to SEQ ID NO: 163; SEQ ID NO; 166 to SEQ ID NO: 173, were Determined to have Novel Utility for the Early Detection, Classification and/or Treatment of Cellular Proliferative Disorders, in Particular Colorectal and/or Liver Cell Proliferative Disorders

[0116] In one embodiment the invention of the method comprises the following steps: i) contacting genomic DNA (preferably isolated from body fluids) obtained from the subject with at least one reagent, or series of reagents that distinguishes between methylated and non-methylated CpG dinucleotides within the gene Septin 9 (including its promoter and regulatory regions); and ii) detecting, or detecting and distinguishing between or among colon or liver cell proliferative disorders afforded with a sensitivity of greater than or equal to 80% and a specificity of greater than or equal to 80%.

[0117] Preferably, the sensitivity is from about 75% to about 96%, or from about 80% to about 90%, or from about 80% to about 85%. Preferably, the specificity is from about 75% to about 96%, or from about 80% to about 90%, or from about 80% to about 85%.

[0118] Genomic DNA may be isolated by any means standard in the art, including the use of commercially available kits. Briefly, wherein the DNA of interest is encapsulated in by a cellular membrane the biological sample must be disrupted and lysed by enzymatic, chemical or mechanical means. The DNA solution may then be cleared of proteins and other contaminants, e.g., by digestion with proteinase K. The genomic DNA is then recovered from the solution. This may be carried out by means of a variety of methods including salting out, organic extraction or binding of the DNA to a solid phase support. The choice of method will be affected by several factors including time, expense and required quantity of DNA. All clinical sample types comprising neoplastic matter or pre-neoplastic matter are suitable for use in the present method, preferred are cell lines, histological slides, biopsies, paraffin-embedded tissue, body fluids, stool, colonic effluent, urine, blood plasma, blood serum, whole blood, isolated blood cells, cells isolated from the blood and combinations thereof. Body fluids are the preferred source of the DNA; particularly preferred are blood plasma, blood serum, whole blood, isolated blood cells and cells isolated from the blood.

[0119] The genomic DNA sample is then treated with at least one reagent, or series of reagents that distinguishes between methylated and non-methylated CpG dinucleotides within at least one target region of the genomic DNA, wherein the target region comprises, or hybridizes under stringent conditions to a sequence of at least 16 contiguous nucleotides of at least one sequence selected from the group consisting of SEQ ID NO: 1 to SEQ ID NO: 3 respectively, wherein said contiguous nucleotides comprise at least one CpG dinucleotide sequence. It is particularly preferred that the target region comprises, or hybridizes under stringent conditions to a sequence of at least 16 contiguous nucleotides of SEQ ID NO: 159 or SEQ ID NO: 164 or most preferably, SEQ ID NO: 165 respectively

[0120] It is particularly preferred that said reagent converts cytosine bases which are unmethylated at the 5′-position to uracil, thymine, or another base which is dissimilar to cytosine in terms of hybridisation behaviour. However in an alternative embodiment said reagent may be a methylation sensitive restriction enzyme.

[0121] Wherein the genomic DNA sample is treated in such a manner that cytosine bases which are unmethylated at the 5′-position are converted to uracil, thymine, or another base which is dissimilar to cytosine in terms of hybridization behavior It is preferred that this treatment is carried out with bisulfite (hydrogen sulfite, disulfite) and subsequent alkaline hydrolysis. Such a treatment results in the conversion of SEQ ID NO: 1 to 3; SEQ ID NO: 159; SEQ ID NO: 164 to SEQ ID NO: 165 to SEQ ID NO: 4 to SEQ ID NO: 9; SEQ ID NO: 160 to SEQ ID NO: 161; SEQ ID NO: 166 to SEQ ID NO: 169 (respectively) wherein said CpG dinucleotides are methylated or SEQ ID NO: 10 to SEQ ID NO: 15; SEQ ID NO: 162 to SEQ ID NO: 163; SEQ ID NO: 170 to SEQ ID NO: 174 (respectively) wherein said CpG dinucleotides are unmethylated.

[0122] The treated DNA is then analysed in order to determine the methylation state of the target gene sequences (Septin 9 prior to the treatment). It is particularly preferred that the target region comprises, or hybridizes under stringent conditions to at least 16 contiguous nucleotides of Septin 9 or its truncated transcript Q9HC74. It is preferred that the sequence of said gene according to SEQ ID NO: 1 is analysed, it is particularly preferred that the sub-regions thereof according to SEQ ID NO: 2 or SEQ ID NO: 3 are analysed. It is further preferred that the CpG rich region according to SEQ ID NO: 159 or SEQ ID NO: 164 or most preferably, SEQ ID NO: 165 is analysed. The method of analysis may be selected from those known in the art, including those listed herein. Particularly preferred are MethyLight™, MSP and the use of blocking oligonucleotides (HeavyMethyl™) as described herein. It is further preferred that any oligonucleotides used in such analysis (including primers, blocking oligonucleotides and detection probes) should be reverse complementary, identical, or hybridise under stringent or highly stringent conditions to an at least 16-base-pair long segment of the base sequences of one or more of SEQ ID NO: 4 to SEQ ID NO: 15 or SEQ ID NO; 160 to SEQ ID NO: 163; SEQ ID NO; 166 to SEQ ID NO: 173 and sequences complementary thereto.

[0123] Aberrant methylation, more specifically hypermethylation of Septin 9 (including its truncated transcript Q9HC74, as well as promoter and/or regulatory regions) is associated with the presence of neoplastic cellular proliferative disorders, and is particularly prevalent in colorectal and hepatocellular carcinomas. Accordingly wherein a biological sample presents within any degree of methylation, said sample should be determined as neoplastic.

[0124] Analysis of one the Septin 9 gene enables for the first time detecting, or detecting and distinguishing between or among colon or liver cell proliferative disorders afforded with a sensitivity of greater than or equal to 80% and a specificity of greater than or equal to 80%. Sensitivity is calculated as: {detected neoplasia/all neoplasia) e.g.: {detected colon neoplasia/all colon neoplasia); and specificity is calculated as (non-detected negatives/total negatives)

[0125] Preferably, the sensitivity is from about 75% to about 96%, or from about 80% to about 90%, or from about 80% to about 85%. Preferably, the specificity is from about 75% to about 96%, or from about 80% to about 90%, or from about 80% to about 85%.

[0126] Colon neoplasia is herein defined as all colon malignancies and adenomas greater than 1 cm., or subsets thereof. Negatives can be defined as healthy individuals.

[0127] In one embodiment the method discloses the use of Septin 9 or its truncated transcript Q9HC74 (or promoter and/or regulatory regions thereof) as a marker for the differentiation, detection and distinguishing of cellular proliferative disorders (in particular neoplastic, colon or liver disorders).

[0128] Said method may be enabled by means of any analysis of the expression of an RNA transcribed therefrom or polypeptide or protein translated from said RNA, preferably by means of mRNA expression analysis or polypeptide expression analysis. Accordingly the present invention also provides diagnostic assays and methods, both quantitative and qualitative for detecting the expression of the gene Septin 9 or its truncated transcript Q9HC74 in a subject and determining therefrom upon the presence or absence of cancer in said subject.

[0129] Aberrant expression of mRNA transcribed from the gene Septin 9 or its truncated transcript Q9HC74 is associated with the presence of cancer in a subject. According to the present invention, under expression (and/or presence methylation) is associated with the presence of cancer, and vice versa over-expression (and/or absence of methylation) is associated with the absence of cancer. It is particularly preferred that the expression of at least one of the transcript variants as disclosed in SEQ ID NO: 16 to SEQ ID NO: 19 is determined.

[0130] To detect the presence of mRNA encoding a gene or genomic sequence, a sample is obtained from a patient. The sample may be any suitable sample comprising cellular matter of the tumour. Suitable sample types include cell lines, histological slides, biopsies, paraffin-embedded tissue, body fluids, stool, colonic effluent, urine, blood plasma, blood serum, whole blood, isolated blood cells, cells isolated from the blood and all possible combinations thereof. It is preferred that said sample types are stool or body fluids selected from the group consisting colonic effluent, urine, blood plasma, blood serum, whole blood, isolated blood cells, cells isolated from the blood.

[0131] The sample may be treated to extract the RNA contained therein. The resulting nucleic acid from the sample is then analysed. Many techniques are known in the state of the art for determining absolute and relative levels of gene expression, commonly used techniques suitable for use in the present invention include in situ hybridisation (e.g. FISH), Northern analysis, RNase protection assays (RPA), microarrays and PCR-based techniques, such as quantitative PCR and differential display PCR or any other nucleic acid detection method.

[0132] Particularly preferred is the use of the reverse transcription/polymerisation chain reaction technique (RT-PCR). The method of RT-PCR is well known in the art (for example, see Watson and Fleming, supra).

[0133] The RT-PCR method can be performed as follows. Total cellular RNA is isolated by, for example, the standard guanidium isothiocyanate method and the total RNA is reverse transcribed. The reverse transcription method involves synthesis of DNA on a template of RNA using a reverse transcriptase enzyme and a 3′ end oligonucleotide dT primer and/or random hexamer primers. The cDNA thus produced is then amplified by means of PCR. (Belyaysky et al, Nucl Acid Res 17:2919-2932, 1989; Krug and Berger, Methods in Enzymology, Academic Press, N.Y., Vol. 152, pp. 316-325, 1987 which are incorporated by reference). Further preferred is the “Real-time” variant of RT-PCR, wherein the PCR product is detected by means of hybridisation probes (e.g. TaqMan, Lightcycler, Molecular Beacons & Scorpion) or SYBR green. The detected signal from the probes or SYBR green is then quantitated either by reference to a standard curve or by comparing the Ct values to that of a calibration standard. Analysis of housekeeping genes is often used to normalize the results.

[0134] In Northern blot analysis total or poly(A)+ mRNA is run on a denaturing agarose gel and detected by hybridisation to a labelled probe in the dried gel itself or on a membrane. The resulting signal is proportional to the amount of target RNA in the RNA population.

[0135] Comparing the signals from two or more cell populations or tissues reveals relative differences in gene expression levels. Absolute quantitation can be performed by comparing the signal to a standard curve generated using known amounts of an in vitro transcript corresponding to the target RNA. Analysis of housekeeping genes, genes whose expression levels are expected to remain relatively constant regardless of conditions, is often used to normalize the results, eliminating any apparent differences caused by unequal transfer of RNA to the membrane or unequal loading of RNA on the gel.

[0136] The first step in Northern analysis is isolating pure, intact RNA from the cells or tissue of interest. Because Northern blots distinguish RNAs by size, sample integrity influences the degree to which a signal is localized in a single band. Partially degraded RNA samples will result in the signal being smeared or distributed over several bands with an overall loss in sensitivity and possibly an erroneous interpretation of the data. In Northern blot analysis, DNA, RNA and oligonucleotide probes can be used and these probes are preferably labelled (e.g. radioactive labels, mass labels or fluorescent labels). The size of the target RNA, not the probe, will determine the size of the detected band, so methods such as random-primed labelling, which generates probes of variable lengths, are suitable for probe synthesis. The specific activity of the probe will determine the level of sensitivity, so it is preferred that probes with high specific activities, are used.

[0137] In an RNase protection assay, the RNA target and an RNA probe of a defined length are hybridised in solution. Following hybridisation, the RNA is digested with RNases specific for single-stranded nucleic acids to remove any unhybridized, single-stranded target RNA and probe. The RNases are inactivated, and the RNA is separated e.g. by denaturing polyacrylamide gel electrophoresis. The amount of intact RNA probe is proportional to the amount of target RNA in the RNA population. RPA can be used for relative and absolute quantitation of gene expression and also for mapping RNA structure, such as intron/exon boundaries and transcription start sites. The RNase protection assay is preferable to Northern blot analysis as it generally has a lower limit of detection.

[0138] The antisense RNA probes used in RPA are generated by in vitro transcription of a DNA template with a defined endpoint and are typically in the range of 50-600 nucleotides. The use of RNA probes that include additional sequences not homologous to the target RNA allows the protected fragment to be distinguished from the full-length probe. RNA probes are typically used instead of DNA probes due to the ease of generating single-stranded RNA probes and the reproducibility and reliability of RNA:RNA duplex digestion with RNases (Ausubel et al. 2003), particularly preferred are probes with high specific activities.

[0139] Particularly preferred is the use of microarrays. The microarray analysis process can be divided into two main parts. First is the immobilization of known gene sequences onto glass slides or other solid support followed by hybridisation of the fluorescently labelled cDNA (comprising the sequences to be interrogated) to the known genes immobilized on the glass slide (or other solid phase). After hybridisation, arrays are scanned using a fluorescent microarray scanner. Analysing the relative fluorescent intensity of different genes provides a measure of the differences in gene expression.

[0140] DNA arrays can be generated by immobilizing presynthesized oligonucleotides onto prepared glass slides or other solid surfaces. In this case, representative gene sequences are manufactured and prepared using standard oligonucleotide synthesis and purification methods. These synthesized gene sequences are complementary to the RNA transcript(s) of the genes of interest (in this case Septin 9 or its truncated transcript Q9HC74) and tend to be shorter sequences in the range of 25-70 nucleotides. In a preferred embodiment said oligonucleotides or polynucleotides comprise at least 9, 18 or 25 bases of a sequence complementary to or hybridising to at least one sequence selected from the group consisting of SEQ ID NO: 16 to SEQ ID NO: 19 and sequences complementary thereto. Alternatively, immobilized oligos can be chemically synthesized in situ on the surface of the slide. In situ oligonucleotide synthesis involves the consecutive addition of the appropriate nucleotides to the spots on the microarray; spots not receiving a nucleotide are protected during each stage of the process using physical or virtual masks. Preferably said synthesized nucleic acids are locked nucleic acids

[0141] In expression profiling microarray experiments, the RNA templates used are representative of the transcription profile of the cells or tissues under study. RNA is first isolated from the cell populations or tissues to be compared. Each RNA sample is then used as a template to generate fluorescently labelled cDNA via a reverse transcription reaction. Fluorescent labelling of the cDNA can be accomplished by either direct labelling or indirect labelling methods. During direct labelling, fluorescently modified nucleotides (e.g., Cy® 3- or Cy® 5-dCTP) are incorporated directly into the cDNA during the reverse transcription. Alternatively, indirect labelling can be achieved by incorporating aminoallyl-modified nucleotides during cDNA synthesis and then conjugating an N-hydroxysuccinimide (NHS)-ester dye to the aminoallyl-modified cDNA after the reverse transcription reaction is complete. Alternatively, the probe may be unlabelled, but may be detectable by specific binding with a ligand which is labelled, either directly or indirectly. Suitable labels and methods for labelling ligands (and probes) are known in the art, and include, for example, radioactive labels which may be incorporated by known methods (e.g., nick translation or kinasing). Other suitable labels include but are not limited to biotin, fluorescent groups, chemiluminescent groups (e.g., dioxetanes, particularly triggered dioxetanes), enzymes, antibodies, and the like.

[0142] To perform differential gene expression analysis, cDNA generated from different RNA samples are labelled with Cy® 3. The resulting labelled cDNA is purified to remove unincorporated nucleotides, free dye and residual RNA. Following purification, the labelled cDNA samples are hybridised to the microarray. The stringency of hybridisation is determined by a number of factors during hybridisation and during the washing procedure, including temperature, ionic strength, length of time and concentration of formamide. These factors are outlined in, for example, Sambrook et al. (Molecular Cloning: A Laboratory Manual, 2nd ed., 1989). The microarray is scanned post-hybridisation using a fluorescent microarray scanner. The fluorescent intensity of each spot indicates the level of expression of the analysed gene; bright spots correspond to strongly expressed genes, while dim spots indicate weak expression.

[0143] Once the images are obtained, the raw data must be analysed. First, the background fluorescence must be subtracted from the fluorescence of each spot. The data is then normalized to a control sequence, such as exogenously added nucleic acids (preferably RNA or DNA), or a housekeeping gene panel to account for any non-specific hybridisation, array imperfections or variability in the array set-up, cDNA labelling, hybridisation or washing. Data normalization allows the results of multiple arrays to be compared.

[0144] Another aspect of the invention relates to a kit for use in diagnosis of cancer in a subject according to the methods of the present invention, said kit comprising: a means for measuring the level of transcription of the gene Septin 9 (or Q9HC74). In a preferred embodiment the means for measuring the level of transcription comprise oligonucleotides or polynucleotides able to hybridise under stringent or moderately stringent conditions to the transcription products of Septin 9 (including but not limited to Q9HC74). Preferably said oligonucleotides or polynucleotides are able to hybridise under stringent or moderately stringent conditions to at least one of the transcription products of Septin 9 (and/or Q9HC74) as provided in SEQ ID NO: 16 to SEQ ID NO: 19. In one embodiment said oligonucleotides or polynucleotides comprise at least 9, 18 or 25 bases of a sequence complementary to or hybridising to at least one sequence selected from the group consisting of SEQ ID NO: 16 to SEQ ID NO: 19 and sequences complementary thereto.

[0145] In a most preferred embodiment the level of transcription is determined by techniques selected from the group of Northern Blot analysis, reverse transcriptase PCR, real-time PCR, RNAse protection, and microarray. In another embodiment of the invention the kit further comprises means for obtaining a biological sample of the patient. Preferred is a kit, which further comprises a container which is most preferably suitable for containing the means for measuring the level of transcription and the biological sample of the patient, and most preferably further comprises instructions for use and interpretation of the kit results.

[0146] In a preferred embodiment the kit comprises (a) a plurality of oligonucleotides or polynucleotides able to hybridise under stringent or moderately stringent conditions to the transcription products of the gene Septin 9 and/or Q9HC74; (b) a container, preferably suitable for containing the oligonucleotides or polynucleotides and a biological sample of the patient comprising the transcription products wherein the oligonucleotides or polynucleotides can hybridise under stringent or moderately stringent conditions to the transcription products, (c) means to detect the hybridisation of (b); and optionally, (d) instructions for use and interpretation of the kit results. It is further preferred that said oligonucleotides or polynucleotides of (a) comprise in each case at least 9, 18 or 25 bases of a sequence complementary to or hybridising to at least one sequence selected from the group consisting of SEQ ID NO: 16 to SEQ ID NO: 19 and sequences complementary thereto.

[0147] The kit may also contain other components such as hybridisation buffer (where the oligonucleotides are to be used as a probe) packaged in a separate container. Alternatively, where the oligonucleotides are to be used to amplify a target region, the kit may contain, packaged in separate containers, a polymerase and a reaction buffer optimised for primer extension mediated by the polymerase, such as PCR. Preferably said polymerase is a reverse transcriptase. It is further preferred that said kit further contains an Rnase reagent.

[0148] The present invention further provides for methods for the detection of the presence of the polypeptide encoded by said gene sequences in a sample obtained from a patient.

[0149] Aberrant levels of polypeptide expression of the polypeptides encoded by the gene Septin 9 or its truncated transcript Q9HC74 are associated with the presence of cancer.

[0150] According to the present invention, under expression of said polypeptides is associated with the presence of cancer. It is particularly preferred that said polypeptides are according to at least one of the amino acid sequences provided in SEQ ID NO: 20 to SEQ ID NO: 23.

[0151] Any method known in the art for detecting polypeptides can be used. Such methods include, but are not limited to mass-spectrometry, immunodiffusion, immunoelectrophoresis, immunochemical methods, binder-ligand assays, immunohistochemical techniques, agglutination and complement assays (e.g., see Basic and Clinical Immunology, Sites and Terr, eds., Appleton & Lange, Norwalk, Conn. pp 217-262, 1991 which is incorporated by reference). Preferred are binder-ligand immunoassay methods including reacting antibodies with an epitope or epitopes and competitively displacing a labelled polypeptide or derivative thereof.

[0152] Certain embodiments of the present invention comprise the use of antibodies specific to the polypeptide encoded by the Septin 9 gene or its truncated transcript Q9HC74. It is particularly preferred that said polypeptides are according to at least one of the amino acid sequences provided in SEQ ID NO: 20 to SEQ ID NO: 23.

[0153] Such antibodies are useful for cancer diagnosis. In certain embodiments production of monoclonal or polyclonal antibodies can be induced by the use of an epitope encoded by a polypeptide of SEQ ID NO: 20 to SEQ ID NO: 23 as an antigene. Such antibodies may in turn be used to detect expressed polypeptides as markers for cancer diagnosis. The levels of such polypeptides present may be quantified by conventional methods. Antibody-polypeptide binding may be detected and quantified by a variety of means known in the art, such as labelling with fluorescent or radioactive ligands. The invention further comprises kits for performing the above-mentioned procedures, wherein such kits contain antibodies specific for the investigated polypeptides.

[0154] Numerous competitive and non-competitive polypeptide binding immunoassays are well known in the art. Antibodies employed in such assays may be unlabelled, for example as used in agglutination tests, or labelled for use a wide variety of assay methods. Labels that can be used include radionuclides, enzymes, fluorescers, chemiluminescers, enzyme substrates or co-factors, enzyme inhibitors, particles, dyes and the like. Preferred assays include but are not limited to radioimmunoassay (RIA), enzyme immunoassays, e.g., enzyme-linked immunosorbent assay (ELISA), fluorescent immunoassays and the like. Polyclonal or monoclonal antibodies or epitopes thereof can be made for use in immunoassays by any of a number of methods known in the art.

[0155] In an alternative embodiment of the method the proteins may be detected by means of western blot analysis. Said analysis is standard in the art, briefly proteins are separated by means of electrophoresis e.g. SDS-PAGE. The separated proteins are then transferred to a suitable membrane (or paper) e.g. nitrocellulose, retaining the spacial separation achieved by electrophoresis. The membrane is then incubated with a blocking agent to bind remaining sticky places on the membrane, commonly used agents include generic protein (e.g. milk protein). An antibody specific to the protein of interest is then added, said antibody being detectably labelled for example by dyes or enzymatic means (e.g. alkaline phosphatase or horseradish peroxidase). The location of the antibody on the membrane is then detected.

[0156] In an alternative embodiment of the method the proteins may be detected by means of immunohistochemistry (the use of antibodies to probe specific antigens in a sample). Said analysis is standard in the art, wherein detection of antigens in tissues is known as immunohistochemistry, while detection in cultured cells is generally termed immunocytochemistry. Briefly the primary antibody to be detected by binding to its specific antigen. The antibody-antigen complex is then bound by a secondary enzyme conjugated antibody. In the presence of the necessary substrate and chromogen the bound enzyme is detected according to coloured deposits at the antibody-antigen binding sites. There is a wide range of suitable sample types, antigen-antibody affinity, antibody types, and detection enhancement methods. Thus optimal conditions for immunohistochemical or immunocytochemical detection must be determined by the person skilled in the art for each individual case.

[0157] One approach for preparing antibodies to a polypeptide is the selection and preparation of an amino acid sequence of all or part of the polypeptide, chemically synthesising the amino acid sequence and injecting it into an appropriate animal, usually a rabbit or a mouse (Milstein and Kohler Nature 256:495-497, 1975; Gulfre and Milstein, Methods in Enzymology: Immunochemical Techniques 73:1-46, Langone and Banatis eds., Academic Press, 1981 which are incorporated by reference in its entirety). Methods for preparation of the polypeptides or epitopes thereof include, but are not limited to chemical synthesis, recombinant DNA techniques or isolation from biological samples.

[0158] In the final step of the method the diagnosis of the patient is determined, whereby under-expression (of Septin 9 or Q9HC74 mRNA or polypeptides) is indicative of the presence of cancer. The term under-expression shall be taken to mean expression at a detected level less than a pre-determined cut off which may be selected from the group consisting of the mean, median or an optimised threshold value. Another aspect of the invention provides a kit for use in diagnosis of cancer in a subject according to the methods of the present invention, comprising: a means for detecting Septin 9 or Q9HC74 polypeptides. Preferably the sequence of said polypeptides is as provided in SEQ ID NO: 20 to SEQ ID NO: 23. The means for detecting the polypeptides comprise preferably antibodies, antibody derivatives, or antibody fragments. The polypeptides are most preferably detected by means of Western Blotting utilizing a labelled antibody. In another embodiment of the invention the kit further comprising means for obtaining a biological sample of the patient. Preferred is a kit, which further comprises a container suitable for containing the means for detecting the polypeptides in the biological sample of the patient, and most preferably further comprises instructions for use and interpretation of the kit results. In a preferred embodiment the kit comprises: (a) a means for detecting Septin 9 or Q9HC74 polypeptides; (b) a container suitable for containing the said means and the biological sample of the patient comprising the polypeptides wherein the means can form complexes with the polypeptides; (c) a means to detect the complexes of (b); and optionally (d) instructions for use and interpretation of the kit results. It is preferred that said means for detecting Septin 9 or Q9HC74 polypeptides are specific for at least one of the polypeptide sequences selected from SEQ ID NO: 20 to SEQ ID NO: 23.

[0159] The kit may also contain other components such as buffers or solutions suitable for blocking, washing or coating, packaged in a separate container.

[0160] Particular embodiments of the present invention provide a novel application of the analysis of methylation levels and/or patterns within said sequences that enables a precise detection, characterisation and/or treatment of liver and/or colorectal cell proliferative disorders. Early detection of cancer is directly linked with disease prognosis, and the disclosed method thereby enables the physician and patient to make better and more informed treatment decisions.

### Further Improvements

[0161] The present invention provides novel uses for the genomic sequence SEQ ID NO: 1, PREFERABLY SEQ ID NO: 2 AND SEQ ID NO: 3 AND EVEN MORE PREFERABLY SEQ ID NO: 159 OR SEQ ID NO: 164 or most preferably, SEQ ID NO: 165. Additional embodiments provide modified variants of SEQ ID NO: 1 TO SEQ ID NO: 3, SEQ ID NO: 159, SEQ ID NO: 164 and SEQ ID NO: 165 as well as oligonucleotides and/or PNA-oligomers for analysis of cytosine methylation patterns within SEQ ID NO: 1 TO SEQ ID NO: 3 AND SEQ ID NO: 159, SEQ ID NO: 164 and SEQ ID NO: 165.

[0162] An objective of the invention comprises analysis of the methylation state of one or more CpG dinucleotides within SEQ ID NO: 1 and sequences complementary thereto, preferably SEQ ID NO: 2 or SEQ ID NO: 3, and more preferably SEQ ID NO: 159 or, SEQ ID NO: 164 and SEQ ID NO: 165 and sequences complementary thereto.

[0163] The disclosed invention provides treated nucleic acids, derived from genomic SEQ ID NO: 1 to SEQ ID NO: 3 and more preferably SEQ ID NO: 159 or SEQ ID NO: 164 or most preferably, SEQ ID NO: 165, wherein the treatment is suitable to convert at least one unmethylated cytosine base of the genomic DNA sequence to uracil or another base that is detectably dissimilar to cytosine in terms of hybridization. The genomic sequences in question may comprise one, or more consecutive methylated CpG positions. Said treatment preferably comprises use of a reagent selected from the group consisting of bisulfite, hydrogen sulfite, disulfite, and combinations thereof. In a preferred embodiment of the invention, the invention provides a non-naturally occurring modified nucleic acid comprising a sequence of at least 16 contiguous nucleotide bases in length of a sequence selected from the group consisting of SEQ ID NO: 4 TO SEQ ID NO: 15 OR MORE PREFERABLY SEQ ID NO; 160 TO SEQ ID NO: 163; SEQ ID NO; 166 TO SEQ ID NO: 173. In further preferred embodiments of the invention said nucleic acid is at least 50, 100, 150, 200, 250 or 500 base pairs in length of a segment of the nucleic acid sequence disclosed in SEQ ID NO: 4 to SEQ ID NO: 15 OR MORE PREFERABLY SEQ ID NO; 160 TO SEQ ID NO: 163; SEQ ID NO; 166 TO SEQ ID NO: 173. Particularly preferred is a nucleic acid molecule that is identical or complementary to all or a portion of the sequences SEQ ID NO: 4 to SEQ ID NO: 15 OR MORE PREFERABLY SEQ ID NO; 160 TO SEQ ID NO: 163; SEQ ID NO; 166 TO SEQ ID NO: 173 but not SEQ ID NO: 1 to SEQ ID NO: 3 or other naturally occurring DNA.

[0164] It is preferred that said sequence comprises at least one CpG, TpA or CpA dinucleotide and sequences complementary thereto. The sequences of SEQ ID NO: 4 TO SEQ ID NO: 15 AND SEQ ID NO; 160 TO SEQ ID NO: 163; SEQ ID NO; 166 TO SEQ ID NO: 173 provide non-naturally occurring modified versions of the nucleic acid according to SEQ ID NO: 1 TO SEQ ID NO: 3 AND SEQ ID NO: 159 OR SEQ ID NO: 164 or most preferably, SEQ ID NO: 165, wherein the modification of each genomic sequence results in the synthesis of a nucleic acid having a sequence that is unique and distinct from said genomic sequence as follows. For each sense strand genomic DNA, e.g., SEQ ID NO: 1, four converted versions are disclosed. A first version wherein “C” is converted to “T,” but “CpG” remains “CpG” (i.e., corresponds to case where, for the genomic sequence, all “C” residues of CpG dinucleotide sequences are methylated and are thus not converted); a second version discloses the complement of the disclosed genomic DNA sequence (i.e. antisense strand), wherein “C” is converted to “T,” but “CpG” remains “CpG” (i.e., corresponds to case where, for all “C” residues of CpG dinucleotide sequences are methylated and are thus not converted). The ‘upmethylated’ converted sequences of SEQ ID NO: 1 to SEQ ID NO: 3 correspond to SEQ ID NO: 4 to SEQ ID NO: 9. The ‘upmethylated’ converted sequences of SEQ ID NO: 159 corresponds to SEQ ID NO: 160 and SEQ ID NO: 161. A third chemically converted version of each genomic sequences is provided, wherein “C” is converted to “T” for all “C” residues, including those of “CpG” dinucleotide sequences (i.e., corresponds to case where, for the genomic sequences, all “C” residues of CpG dinucleotide sequences are unmethylated); a final chemically converted version of each sequence, discloses the complement of the disclosed genomic DNA sequence (i.e. antisense strand), wherein “C” is converted to “T” for all “C” residues, including those of “CpG” dinucleotide sequences (i.e., corresponds to case where, for the complement (antisense strand) of each genomic sequence, all “C” residues of CpG dinucleotide sequences are unmethylated). The ‘downmethylated’ converted sequences of SEQ ID NO: 1 to SEQ ID NO: 3 correspond to SEQ ID NO: 10 to SEQ ID NO: 15. The ‘downmethylated’ converted sequences of SEQ ID NO: 159 corresponds to SEQ ID NO: 162 and SEQ ID NO: 163.). The ‘downmethylated’ converted sequences of SEQ ID NO: 164 to SEQ ID NO: 165 correspond to SEQ ID NO: 10 to SEQ ID NO: 15.

[0165] Significantly, heretofore, the nucleic acid sequences and molecules according SEQ ID NO: 4 to SEQ ID NO: 15 and SEQ ID NO: 160 to SEQ ID NO: 163 were not implicated in or connected with the detection, classification or treatment of cellular proliferative disorders.

[0166] In an alternative preferred embodiment, the invention further provides oligonucleotides or oligomers suitable for use in the methods of the invention for detecting the cytosine methylation state within genomic or treated (chemically modified) DNA, according to SEQ ID NO: 1 to SEQ ID NO: 15 and more preferably SEQ ID NO: 159 to SEQ ID NO: 173. Said oligonucleotide or oligomer nucleic acids provide novel diagnostic means. Said oligonucleotide or oligomer comprising a nucleic acid sequence having a length of at least nine (9) nucleotides which is identical to, hybridizes, under moderately stringent or stringent conditions (as defined herein above), to a treated nucleic acid sequence according to SEQ ID NO: 4 to SEQ ID NO: 15 and/or sequences complementary thereto, or to a genomic sequence according to SEQ ID NO: 1 to SEQ ID NO: 3 and/or sequences complementary thereto. It is particularly preferred that said oligonucleotide or oligomer comprising a nucleic acid sequence having a length of at least nine (9) nucleotides which is identical to, hybridizes, under moderately stringent or stringent conditions (as defined herein above), to a treated nucleic acid sequence according to SEQ ID NO; 160 to SEQ ID NO: 163; SEQ ID NO; 166 to SEQ ID NO: 173 and/or sequences complementary thereto, or to a genomic sequence according to SEQ ID NO: 159; SEQ ID NO: 164 and SEQ ID NO: 165 and/or sequences complementary thereto.

[0167] Thus, the present invention includes nucleic acid molecules (e.g., oligonucleotides and peptide nucleic acid (PNA) molecules (PNA-oligomers)) that hybridize under moderately stringent and/or stringent hybridization conditions to all or a portion of the sequences SEQ ID NO: 1 to SEQ ID NO: 15 or SEQ ID NO; 159 to SEQ ID NO: 173 or to the complements thereof. Particularly preferred is a nucleic acid molecule that hybridizes under moderately stringent and/or stringent hybridization conditions to all or a portion of the sequences SEQ ID NO: 4 to SEQ ID NO: 15 but not SEQ ID NO: 1 to SEQ ID NO: 3 or other human genomic DNA. Even further preferred is a nucleic acid molecule that hybridizes under moderately stringent and/or stringent hybridization conditions to all or a portion of the sequences SEQ ID NO; 160 to SEQ ID NO: 163; SEQ ID NO; 166 to SEQ ID NO: 173 but not SEQ ID NO: 159, SEQ ID NO: 164 or SEQ ID NO: 165 or other human genomic DNA.

[0168] The identical or hybridizing portion of the hybridizing nucleic acids is typically at least 9, 16, 20, 25, 30 or 35 nucleotides in length. However, longer molecules have inventive utility, and are thus within the scope of the present invention.

[0169] Preferably, the hybridizing portion of the inventive hybridizing nucleic acids is at least 95%, or at least 98%, or 100% identical to the sequence, or to a portion thereof or to the complements thereof.

[0170] Hybridizing nucleic acids of the type described herein can be used, for example, as a primer (e.g., a PCR primer), or a diagnostic and/or prognostic probe or primer. Preferably, hybridization of the oligonucleotide probe to a nucleic acid sample is performed under stringent conditions and the probe is 100% identical to the target sequence. Nucleic acid duplex or hybrid stability is expressed as the melting temperature or Tm, which is the temperature at which a probe dissociates from a target DNA. This melting temperature is used to define the required stringency conditions.

[0171] For target sequences that are related and substantially identical to the corresponding sequence of SEQ ID NO: 1 to SEQ ID NO: 3 or SEQ ID NO: 159, SEQ ID NO: 164 or SEQ ID NO: 165 (such as allelic variants and SNPs), rather than identical, it is useful to first establish the lowest temperature at which only homologous hybridization occurs with a particular concentration of salt (e.g., SSC or SSPE). Then, assuming that 1% mismatching results in a 1° C. decrease in the Tm, the temperature of the final wash in the hybridization reaction is reduced accordingly (for example, if sequences having >95% identity with the probe are sought, the final wash temperature is decreased by 5° C.). In practice, the change in Tm can be between 0.5° C. and 1.5° C. per 1% mismatch.

[0172] Examples of inventive oligonucleotides of length X (in nucleotides), as indicated by polynucleotide positions with reference to, e.g., SEQ ID NO: 1, include those corresponding to sets (sense and antisense sets) of consecutively overlapping oligonucleotides of length X, where the oligonucleotides within each consecutively overlapping set (corresponding to a given X value) are defined as the finite set of Z oligonucleotides from nucleotide positions:

[0173] n to (n+(X−1));

[0174] where n=1, 2, 3, . . . (Y−(X−1));

[0175] where Y equals the length (nucleotides or base pairs) of SEQ ID NO: 1 (219909);

[0176] where X equals the common length (in nucleotides) of each oligonucleotide in the set (e.g., X=20 for a set of consecutively overlapping 20-mers); and

[0177] where the number (Z) of consecutively overlapping oligomers of length X for a given SEQ ID NO of length Y is equal to Y−(X−1). For example Z=219909−19=219890 for either sense or antisense sets of SEQ ID NO: 1, where X=20.

[0178] Preferably, the set is limited to those oligomers that comprise at least one CpG, TpG or CpA dinucleotide.

[0179] Examples of inventive 20-mer oligonucleotides include the following set of 219890 oligomers (and the antisense set complementary thereto), indicated by polynucleotide positions with reference to SEQ ID NO: 1:

[0180] 1-20, 2-21, 3-22, 4-23, 5-24, and 219890-219909.

[0181] Preferably, the set is limited to those oligomers that comprise at least one CpG, TpG or CpA dinucleotide.

[0182] Likewise, examples of inventive 25-mer oligonucleotides include the following set of 219885 oligomers (and the antisense set complementary thereto), indicated by polynucleotide positions with reference to SEQ ID NO: 1:

[0183] 1-25, 2-26, 3-27, 4-28, 5-29, and 219885-219909.

[0184] Preferably, the set is limited to those oligomers that comprise at least one CpG, TpG or CpA dinucleotide.

[0185] The present invention encompasses, for each of SEQ ID NO: 1 to SEQ ID NO: 15 (sense and antisense), multiple consecutively overlapping sets of oligonucleotides or modified oligonucleotides of length X, where, e.g., X=9, 10, 17, 20, 22, 23, 25, 27, 30 or 35 nucleotides.

[0186] The oligonucleotides or oligomers according to the present invention constitute effective tools useful to ascertain genetic and epigenetic parameters of the genomic sequence corresponding to SEQ ID NO: 1. Preferred sets of such oligonucleotides or modified oligonucleotides of length X are those consecutively overlapping sets of oligomers corresponding to SEQ ID NO: 1 to SEQ ID NO: 15 and SEQ ID NO: 159 to SEQ ID NO: 173 (and to the complements thereof). Preferably, said oligomers comprise at least one CpG, TpG or CpA dinucleotide.

[0187] Particularly preferred oligonucleotides or oligomers according to the present invention are those in which the cytosine of the CpG dinucleotide (or of the corresponding converted TpG or CpA dinucleotide) sequences is within the middle third of the oligonucleotide; that is, where the oligonucleotide is, for example, 13 bases in length, the CpG, TpG or CpA dinucleotide is positioned within the fifth to ninth nucleotide from the 5′-end.

[0188] The oligonucleotides of the invention can also be modified by chemically linking the oligonucleotide to one or more moieties or conjugates to enhance the activity, stability or detection of the oligonucleotide. Such moieties or conjugates include chromophores, fluorophors, lipids such as cholesterol, cholic acid, thioether, aliphatic chains, phospholipids, polyamines, polyethylene glycol (PEG), palmityl moieties, and others as disclosed in, for example, U.S. Pat. Nos. 5,514,758, 5,565,552, 5,567,810, 5,574,142, 5,585,481, 5,587,371, 5,597,696 and 5,958,773. The probes may also exist in the form of a PNA (peptide nucleic acid) which has particularly preferred pairing properties. Thus, the oligonucleotide may include other appended groups such as peptides, and may include hybridization-triggered cleavage agents (Krol et al., BioTechniques 6:958-976, 1988) or intercalating agents (Zon, Pharm. Res. 5:539-549, 1988). To this end, the oligonucleotide may be conjugated to another molecule, e.g., a chromophore, fluorophor, peptide, hybridization-triggered cross-linking agent, transport agent, hybridization-triggered cleavage agent, etc.

[0189] The oligonucleotide may also comprise at least one art-recognized modified sugar and/or base moiety, or may comprise a modified backbone or non-natural internucleoside linkage.

[0190] The oligonucleotides or oligomers according to particular embodiments of the present invention are typically used in ‘sets,’ which contain at least one oligomer for analysis of each of the CpG dinucleotides of a genomic sequence selected from the group consisting SEQ ID NO: 1 to SEQ ID NO: 3 and sequences complementary thereto, or to the corresponding CpG, TpG or CpA dinucleotide within a sequence of the treated nucleic acids according to SEQ ID NO: 4 to SEQ ID NO: 15 and sequences complementary thereto. It is further preferred that said set contains at least one oligomer for analysis of each of the CpG dinucleotides of a genomic sequence selected from the group consisting SEQ ID NO: 159, SEQ ID NO: 164 and SEQ ID NO: 165 and sequences complementary thereto, or to the corresponding CpG, TpG or CpA dinucleotide within a sequence of the treated nucleic acids according to SEQ ID NO; 160 to SEQ ID NO: 163; SEQ ID NO; 166 to SEQ ID NO: 173 and sequences complementary thereto. However, it is anticipated that for economic or other factors it may be preferable to analyse a limited selection of the CpG dinucleotides within said sequences, and the content of the set of oligonucleotides is altered accordingly.

[0191] Therefore, in particular embodiments, the present invention provides a set of at least two (2) (oligonucleotides and/or PNA-oligomers) useful for detecting the cytosine methylation state in treated genomic DNA (SEQ ID NO: 4 to SEQ ID NO: 15, or more preferably SEQ ID NO; 160 to SEQ ID NO: 163; SEQ ID NO; 166 to SEQ ID NO: 173), or in genomic DNA (SEQ ID NO: 1 to SEQ ID NO: 3 but more preferably SEQ ID NO: 159 or SEQ ID NO: 164 or most preferably, SEQ ID NO: 165 and sequences complementary thereto). These probes enable diagnosis, classification and/or therapy of genetic and epigenetic parameters of liver and/or colorectal cell proliferative disorders. The set of oligomers may also be used for detecting single nucleotide polymorphisms (SNPs) in treated genomic DNA (SEQ ID NO: 4 to SEQ ID NO: 15 or more preferably SEQ ID NO; 160 to SEQ ID NO: 163; SEQ ID NO; 166 to SEQ ID NO: 173), or in genomic DNA (SEQ ID NO: 1 to SEQ ID NO: 3 but more preferably SEQ ID NO: 159 or SEQ ID NO: 164 or most preferably, SEQ ID NO: 165 and sequences complementary thereto).

[0192] In preferred embodiments, at least one, and more preferably all members of a set of oligonucleotides is bound to a solid phase.

[0193] In further embodiments, the present invention provides a set of at least two (2) oligonucleotides that are used as ‘primer’ oligonucleotides for amplifying DNA sequences of one of SEQ ID NO: 1 to SEQ ID NO: 15 but more preferably SEQ ID NO; 159 to SEQ ID NO: 173, and sequences complementary thereto, or segments thereof.

[0194] It is anticipated that the oligonucleotides may constitute all or part of an “array” or “DNA chip” (i.e., an arrangement of different oligonucleotides and/or PNA-oligomers bound to a solid phase). Such an array of different oligonucleotide- and/or PNA-oligomer sequences can be characterized, for example, in that it is arranged on the solid phase in the form of a rectangular or hexagonal lattice. The solid-phase surface may be composed of silicon, glass, polystyrene, aluminium, steel, iron, copper, nickel, silver, or gold. Nitrocellulose as well as plastics such as nylon, which can exist in the form of pellets or also as resin matrices, may also be used. An overview of the Prior Art in oligomer array manufacturing can be gathered from a special edition of Nature Genetics (Nature Genetics Supplement, Volume 21, January 1999, and from the literature cited therein). Fluorescently labelled probes are often used for the scanning of immobilized DNA arrays. The simple attachment of Cy3 and Cy5 dyes to the 5′-OH of the specific probe are particularly suitable for fluorescence labels. The detection of the fluorescence of the hybridised probes may be carried out, for example, via a confocal microscope. Cy3 and Cy5 dyes, besides many others, are commercially available.

[0195] It is also anticipated that the oligonucleotides, or particular sequences thereof, may constitute all or part of an “virtual array” wherein the oligonucleotides, or particular sequences thereof, are used, for example, as ‘specifiers’ as part of, or in combination with a diverse population of unique labeled probes to analyze a complex mixture of analytes. Such a method, for example is described in US 2003/0013091 (U.S. Ser. No. 09/898,743, published 16 Jan. 2003). In such methods, enough labels are generated so that each nucleic acid in the complex mixture (i.e., each analyte) can be uniquely bound by a unique label and thus detected (each label is directly counted, resulting in a digital read-out of each molecular species in the mixture).

[0196] It is particularly preferred that the oligomers according to the invention are utilised for at least one of: detection of; detection and differentiation between or among subclasses of; diagnosis of; prognosis of; treatment of; monitoring of; and treatment and monitoring of liver and/or colorectal cell proliferative disorders. This is enabled by use of said sets for the detection or detection and differentiation of one or more of the following classes of tissues: colorectal carcinoma, colon adenoma, inflammatory colon tissue, grade 2 dysplasia colon adenomas less than 1 cm, grade 3 dysplasia colon adenomas larger than 1 cm, normal colon tissue, non-colon healthy tissue and non-colon cancer tissue.

[0197] Particularly preferred are those sets of oligomers according to the Examples. In the most preferred embodiment of the method, the presence or absence of a cellular proliferative disorder, most preferably a neoplastic cellular proliferation or differentiation thereof from benign disorders is determined. This is achieved by analysis of the methylation status of at least one target sequence comprising at least one CpG position said sequence comprising, or hybridizing under stringent conditions to at least 16 contiguous nucleotides of a sequence selected from the group consisting SEQ ID NO: 1 to SEQ ID NO: 3 and complements thereof or more preferably SEQ ID NO: 159 or SEQ ID NO: 164 or most preferably, SEQ ID NO: 165 and complements thereof. The present invention further provides a method for ascertaining genetic and/or epigenetic parameters of the genomic sequence according to SEQ ID NO: 1 to SEQ ID NO: 3 (and more preferably SEQ ID NO: 159 or SEQ ID NO: 164 or most preferably, SEQ ID NO: 165) within a subject by analysing cytosine methylation and single nucleotide polymorphisms. Said method comprising contacting a nucleic acid comprising SEQ ID NO: 1 to SEQ ID NO: 3 (or more preferably SEQ ID NO: 159 or SEQ ID NO: 164 or most preferably, SEQ ID NO: 165) in a biological sample obtained from said subject with at least one reagent or a series of reagents, wherein said reagent or series of reagents, distinguishes between methylated and non-methylated CpG dinucleotides within the target nucleic acid.

[0198] In a preferred embodiment, said method comprises the following steps: In the first step, a sample of the tissue to be analysed is obtained. The source may be any suitable source, such as cell lines, histological slides, biopsies, paraffin-embedded tissue, body fluids, stool, colonic effluent, urine, blood plasma, blood serum, whole blood, isolated blood cells, cells isolated from the blood and all possible combinations thereof. It is preferred that said sources of DNA are stool or body fluids selected from the group consisting colonic effluent, urine, blood plasma, blood serum, whole blood, isolated blood cells, cells isolated from the blood.

[0199] The genomic DNA is then isolated from the sample. Genomic DNA may be isolated by any means standard in the art, including the use of commercially available kits. Briefly, wherein the DNA of interest is encapsulated in by a cellular membrane the biological sample must be disrupted and lysed by enzymatic, chemical or mechanical means. The DNA solution may then be cleared of proteins and other contaminants e.g. by digestion with proteinase K. The genomic DNA is then recovered from the solution. This may be carried out by means of a variety of methods including salting out, organic extraction or binding of the DNA to a solid phase support. The choice of method will be affected by several factors including time, expense and required quantity of DNA.

[0200] Wherein the sample DNA is not enclosed in a membrane (e.g. circulating DNA from a blood sample) methods standard in the art for the isolation and/or purification of DNA may be employed. Such methods include the use of a protein degenerating reagent e.g. chaotropic salt e.g. guanidine hydrochloride or urea; or a detergent e.g. sodium dodecyl sulphate (SDS), cyanogen bromide. Alternative methods include but are not limited to ethanol precipitation or propanol precipitation, vacuum concentration amongst others by means of a centrifuge. The person skilled in the art may also make use of devices such as filter devices e.g. ultrafiltration, silica surfaces or membranes, magnetic particles, polystyrol particles, polystyrol surfaces, positively charged surfaces, and positively charged membranes, charged membranes, charged surfaces, charged switch membranes, charged switched surfaces.

[0201] Once the nucleic acids have been extracted, the genomic double stranded DNA is used in the analysis.

[0202] In the second step of the method, the genomic DNA sample is treated in such a manner that cytosine bases which are unmethylated at the 5′-position are converted to uracil, thymine, or another base which is dissimilar to cytosine in terms of hybridisation behaviour. This will be understood as ‘pre-treatment’ or ‘treatment’ herein.

[0203] This is preferably achieved by means of treatment with a bisulfite reagent. The term “bisulfite reagent” refers to a reagent comprising bisulfite, disulfite, hydrogen sulfite or combinations thereof, useful as disclosed herein to distinguish between methylated and unmethylated CpG dinucleotide sequences. Methods of said treatment are known in the art (e.g. PCT/EP2004/011715, which is incorporated by reference in its entirety). It is preferred that the bisulfite treatment is conducted in the presence of denaturing solvents such as but not limited to n-alkylenglycol, particularly diethylene glycol dimethyl ether (DME), or in the presence of dioxane or dioxane derivatives. In a preferred embodiment the denaturing solvents are used in concentrations between 1% and 35% (v/v). It is also preferred that the bisulfite reaction is carried out in the presence of scavengers such as but not limited to chromane derivatives, e.g., 6-hydroxy-2,5,7,8,-tetramethylchromane 2-carboxylic acid or trihydroxybenzo acid and derivates thereof, e.g. Gallic acid (see: PCT/EP2004/011715 which is incorporated by reference in its entirety). The bisulfite conversion is preferably carried out at a reaction temperature between 30° C. and 70° C., whereby the temperature is increased to over 85° C. for short periods of times during the reaction (see: PCT/EP2004/011715 which is incorporated by reference in its entirety). The bisulfite treated DNA is preferably purified priori to the quantification. This may be conducted by any means known in the art, such as but not limited to ultrafiltration, preferably carried out by means of Microcon™ columns (manufactured by Millipore™). The purification is carried out according to a modified manufacturer's protocol (see: PCT/EP2004/011715 which is incorporated by reference in its entirety).

[0204] In the third step of the method, fragments of the treated DNA are amplified, using sets of primer oligonucleotides according to the present invention, and an amplification enzyme. The amplification of several DNA segments can be carried out simultaneously in one and the same reaction vessel. Typically, the amplification is carried out using a polymerase chain reaction (PCR). Preferably said amplificates are 100 to 2,000 base pairs in length. The set of primer oligonucleotides includes at least two oligonucleotides whose sequences are each reverse complementary, identical, or hybridise under stringent or highly stringent conditions to an at least 16-base-pair long segment of the base sequences of one of SEQ ID NO: 4 to SEQ ID NO: 15 and sequences complementary thereto. Preferably the set of primer oligonucleotides includes at least two oligonucleotides whose sequences are each reverse complementary, identical, or hybridise under stringent or highly stringent conditions to an at least 16-base-pair long segment of the base sequences of one of SEQ ID NO; 160 to SEQ ID NO: 163; SEQ ID NO; 166 to SEQ ID NO: 173 and sequences complementary thereto.

[0205] In an alternate embodiment of the method, the methylation status of pre-selected CpG positions within the nucleic acid sequences according to SEQ ID NO: 1, preferably SEQ ID NO: 2 or SEQ ID NO: 3, and even more preferably SEQ ID NO: 159 or SEQ ID NO: 164 or most preferably, SEQ ID NO: 165 may be detected by use of methylation-specific primer oligonucleotides. This technique (MSP) has been described in U.S. Pat. No. 6,265,171 to Herman. The use of methylation status specific primers for the amplification of bisulfite treated DNA allows the differentiation between methylated and unmethylated nucleic acids. MSP primers pairs contain at least one primer which hybridises to a bisulfite treated CpG dinucleotide. Therefore, the sequence of said primers comprises at least one CpG dinucleotide. MSP primers specific for non-methylated DNA contain a “T’ at the position of the C position in the CpG. Preferably, therefore, the base sequence of said primers is required to comprise a sequence having a length of at least 9 nucleotides which hybridises to a treated nucleic acid sequence according to one of SEQ ID NO: 4 to SEQ ID NO: 15 and sequences complementary thereto, wherein the base sequence of said oligomers comprises at least one CpG dinucleotide. It is particularly preferred that said primers comprise a sequence having a length of at least 9 nucleotides which hybridises to a treated nucleic acid sequence according to one of SEQ ID NO; 160 to SEQ ID NO: 163; SEQ ID NO; 166 to SEQ ID NO: 173 and sequences complementary thereto, wherein the base sequence of said oligomers comprises at least one CpG dinucleotide. A further preferred embodiment of the method comprises the use of blocker oligonucleotides (the HeavyMethyl™ assay). The use of such blocker oligonucleotides has been described by Yu et al., BioTechniques 23:714-720, 1997. Blocking probe oligonucleotides are hybridised to the bisulfite treated nucleic acid concurrently with the PCR primers. PCR amplification of the nucleic acid is terminated at the 5′ position of the blocking probe, such that amplification of a nucleic acid is suppressed where the complementary sequence to the blocking probe is present. The probes may be designed to hybridize to the bisulfite treated nucleic acid in a methylation status specific manner. For example, for detection of methylated nucleic acids within a population of unmethylated nucleic acids, suppression of the amplification of nucleic acids which are unmethylated at the position in question would be carried out by the use of blocking probes comprising a ‘CpA’ or ‘TpA’ at the position in question, as opposed to a ‘CpG’ if the suppression of amplification of methylated nucleic acids is desired.

[0206] For PCR methods using blocker oligonucleotides, efficient disruption of polymerase-mediated amplification requires that blocker oligonucleotides not be elongated by the polymerase. Preferably, this is achieved through the use of blockers that are 3′-deoxyoligonucleotides, or oligonucleotides derivitized at the 3′ position with other than a “free” hydroxyl group. For example, 3′-O-acetyl oligonucleotides are representative of a preferred class of blocker molecule.

[0207] Additionally, polymerase-mediated decomposition of the blocker oligonucleotides should be precluded. Preferably, such preclusion comprises either use of a polymerase lacking 5′-3′ exonuclease activity, or use of modified blocker oligonucleotides having, for example, thioate bridges at the 5′-terminii thereof that render the blocker molecule nuclease-resistant. Particular applications may not require such 5′ modifications of the blocker. For example, if the blocker- and primer-binding sites overlap, thereby precluding binding of the primer (e.g., with excess blocker), degradation of the blocker oligonucleotide will be substantially precluded. This is because the polymerase will not extend the primer toward, and through (in the 5′-3′ direction) the blocker—a process that normally results in degradation of the hybridized blocker oligonucleotide.

[0208] A particularly preferred blocker/PCR embodiment, for purposes of the present invention and as implemented herein, comprises the use of peptide nucleic acid (PNA) oligomers as blocking oligonucleotides. Such PNA blocker oligomers are ideally suited, because they are neither decomposed nor extended by the polymerase.

[0209] Preferably, therefore, the base sequence of said blocking oligonucleotides is required to comprise a sequence having a length of at least 9 nucleotides which hybridises to a treated nucleic acid sequence according to one of SEQ ID NO: 4 to SEQ ID NO: 15 and sequences complementary thereto, wherein the base sequence of said oligonucleotides comprises at least one CpG, TpG or CpA dinucleotide. It is further preferred that the base sequence of said blocking oligonucleotides is required to comprise a sequence having a length of at least 9 nucleotides which hybridises to a treated nucleic acid sequence according to one of SEQ ID NO; 160 to SEQ ID NO: 163; SEQ ID NO; 166 to SEQ ID NO: 173 and sequences complementary thereto, wherein the base sequence of said oligonucleotides comprises at least one CpG, TpG or CpA dinucleotide.

[0210] The fragments obtained by means of the amplification can carry a directly or indirectly detectable label. Preferred are labels in the form of fluorescence labels, radionuclides, or detachable molecule fragments having a typical mass which can be detected in a mass spectrometer. Where said labels are mass labels, it is preferred that the labelled amplificates have a single positive or negative net charge, allowing for better delectability in the mass spectrometer. The detection may be carried out and visualized by means of, e.g., matrix assisted laser desorption/ionization mass spectrometry (MALDI) or using electron spray mass spectrometry (ESI).

[0211] Matrix Assisted Laser Desorption/Ionization Mass Spectrometry (MALDI-TOF) is a very efficient development for the analysis of biomolecules (Karas & Hillenkamp, Anal Chem., 60:2299-301, 1988). An analyte is embedded in a light-absorbing matrix. The matrix is evaporated by a short laser pulse thus transporting the analyte molecule into the vapor phase in an unfragmented manner. The analyte is ionized by collisions with matrix molecules. An applied voltage accelerates the ions into a field-free flight tube. Due to their different masses, the ions are accelerated at different rates. Smaller ions reach the detector sooner than bigger ones. MALDI-TOF spectrometry is well suited to the analysis of peptides and proteins. The analysis of nucleic acids is somewhat more difficult (Gut & Beck, Current Innovations and Future Trends, 1:147-57, 1995). The sensitivity with respect to nucleic acid analysis is approximately 100-times less than for peptides, and decreases disproportionally with increasing fragment size. Moreover, for nucleic acids having a multiply negatively charged backbone, the ionization process via the matrix is considerably less efficient. In MALDI-TOF spectrometry, the selection of the matrix plays an eminently important role. For desorption of peptides, several very efficient matrixes have been found which produce a very fine crystallisation. There are now several responsive matrixes for DNA, however, the difference in sensitivity between peptides and nucleic acids has not been reduced. This difference in sensitivity can be reduced, however, by chemically modifying the DNA in such a manner that it becomes more similar to a peptide. For example, phosphorothioate nucleic acids, in which the usual phosphates of the backbone are substituted with thiophosphates, can be converted into a charge-neutral DNA using simple alkylation chemistry (Gut & Beck, Nucleic Acids Res. 23: 1367-73, 1995). The coupling of a charge tag to this modified DNA results in an increase in MALDI-TOF sensitivity to the same level as that found for peptides. A further advantage of charge tagging is the increased stability of the analysis against impurities, which makes the detection of unmodified substrates considerably more difficult.

[0212] In the fourth step of the method, the amplificates obtained during the third step of the method are analysed in order to ascertain the methylation status of the CpG dinucleotides prior to the treatment.

[0213] In embodiments where the amplificates were obtained by means of MSP amplification, the presence or absence of an amplificate is in itself indicative of the methylation state of the CpG positions covered by the primer, according to the base sequences of said primer.

[0214] Amplificates obtained by means of both standard and methylation specific PCR may be further analysed by means of based-based methods such as, but not limited to, array technology and probe based technologies as well as by means of techniques such as sequencing and template directed extension.

[0215] In one embodiment of the method, the amplificates synthesised in step three are subsequently hybridized to an array or a set of oligonucleotides and/or PNA probes. In this context, the hybridization takes place in the following manner: the set of probes used during the hybridization is preferably composed of at least 2 oligonucleotides or PNA-oligomers; in the process, the amplificates serve as probes which hybridize to oligonucleotides previously bonded to a solid phase; the non-hybridized fragments are subsequently removed; said oligonucleotides contain at least one base sequence having a length of at least 9 nucleotides which is reverse complementary or identical to a segment of the base sequences specified in the present Sequence Listing; and the segment comprises at least one CpG, TpG or CpA dinucleotide. The hybridizing portion of the hybridizing nucleic acids is typically at least 9, 15, 20, 25, 30 or 35 nucleotides in length. However, longer molecules have inventive utility, and are thus within the scope of the present invention. In a preferred embodiment, said dinucleotide is present in the central third of the oligomer. For example, wherein the oligomer comprises one CpG dinucleotide, said dinucleotide is preferably the fifth to ninth nucleotide from the 5′-end of a 13-mer. One oligonucleotide exists for the analysis of each CpG dinucleotide within a sequence selected from the group consisting SEQ ID NO: 1 to SEQ ID NO: 3, and the equivalent positions within SEQ ID NO: 4 to SEQ ID NO: 15. It is further preferred that one oligonucleotide exists for the analysis of each CpG dinucleotide within a sequence selected from the group consisting SEQ ID NO: 159, SEQ ID NO: 164 and SEQ ID NO: 165 and the equivalent positions within SEQ ID NO; 160 to SEQ ID NO: 163; SEQ ID NO; 166 to SEQ ID NO: 173. Said oligonucleotides may also be present in the form of peptide nucleic acids. The non-hybridised amplificates are then removed. The hybridised amplificates are then detected. In this context, it is preferred that labels attached to the amplificates are identifiable at each position of the solid phase at which an oligonucleotide sequence is located.

[0216] In yet a further embodiment of the method, the genomic methylation status of the CpG positions may be ascertained by means of oligonucleotide probes (as detailed above) that are hybridised to the bisulfite treated DNA concurrently with the PCR amplification primers (wherein said primers may either be methylation specific or standard).

[0217] A particularly preferred embodiment of this method is the use of fluorescence-based Real Time Quantitative PCR (Heid et al., Genome Res. 6:986-994, 1996; also see U.S. Pat. No. 6,331,393) employing a dual-labelled fluorescent oligonucleotide probe (TaqMan™ PCR, using an ABI Prism 7700 Sequence Detection System, Perkin Elmer Applied Biosystems, Foster City, Calif.). The TaqMan™ PCR reaction employs the use of a non-extendible interrogating oligonucleotide, called a TaqMan™ probe, which, in preferred embodiments, is designed to hybridise to a CpG-rich sequence located between the forward and reverse amplification primers. The TaqMan™ probe further comprises a fluorescent “reporter moiety” and a “quencher moiety” covalently bound to linker moieties (e.g., phosphoramidites) attached to the nucleotides of the TaqMan™ oligonucleotide. For analysis of methylation within nucleic acids subsequent to bisulfite treatment, it is required that the probe be methylation specific, as described in U.S. Pat. No. 6,331,393, (hereby incorporated by reference in its entirety) also known as the MethyLight™ assay. Variations on the TaqMan™ detection methodology that are also suitable for use with the described invention include the use of dual-probe technology (Lightcycler™) or fluorescent amplification primers (Sunrise™ technology). Both these techniques may be adapted in a manner suitable for use with bisulfite treated DNA, and moreover for methylation analysis within CpG dinucleotides.

[0218] In a further preferred embodiment of the method, the fourth step of the method comprises the use of template-directed oligonucleotide extension, such as MS-SNuPE as described by Gonzalgo & Jones, Nucleic Acids Res. 25:2529-2531, 1997.

[0219] In yet a further embodiment of the method, the fourth step of the method comprises sequencing and subsequent sequence analysis of the amplificate generated in the third step of the method (Sanger F., et al., Proc Natl Acad Sci USA 74:5463-5467, 1977).

### Best Mode

[0220] In the most preferred embodiment of the method the genomic nucleic acids are isolated and treated according to the first three steps of the method outlined above, namely:

[0221] a) obtaining, from a subject, a biological sample having subject genomic DNA;

[0222] b) extracting or otherwise isolating the genomic DNA;

[0223] c) treating the genomic DNA of b), or a fragment thereof, with one or more reagents to convert cytosine bases that are unmethylated in the 5-position thereof to uracil or to another base that is detectably dissimilar to cytosine in terms of hybridization properties; and wherein

[0224] d) amplifying subsequent to treatment in c) is carried out in a methylation specific manner, namely by use of methylation specific primers or blocking oligonucleotides, and further wherein

[0225] e) detecting of the amplificates is carried out by means of a real-time detection probe, as described above.

[0226] Preferably, where the subsequent amplification of d) is carried out by means of methylation specific primers, as described above, said methylation specific primers comprise a sequence having a length of at least 9 nucleotides which hybridises to a treated nucleic acid sequence according to one of SEQ ID NO: 4 to SEQ ID NO: 15 and sequences complementary thereto, wherein the base sequence of said oligomers comprise at least one CpG dinucleotide.

[0227] It is further preferred that, where the subsequent amplification of d) is carried out by means of methylation specific primers, as described above, said methylation specific primers comprise a sequence having a length of at least 9 nucleotides which hybridises to a treated nucleic acid sequence according to one of SEQ ID NO; 160 to SEQ ID NO: 163; SEQ ID NO; 166 to SEQ ID NO: 173 and sequences complementary thereto, wherein the base sequence of said oligomers comprise at least one CpG dinucleotide.

[0228] Step e) of the method, namely the detection of the specific amplificates indicative of the methylation status of one or more CpG positions according to SEQ ID NO: 1 is carried out by means of real-time detection methods as described above.

[0229] Additional embodiments of the invention provide a method for the analysis of the methylation status of genomic DNA according to the invention (SEQ ID NO: 1 to SEQ ID NO: 3, and complements thereof more preferably SEQ ID NO: 159 or SEQ ID NO: 164 or most preferably, SEQ ID NO: 165 and complements thereof), without the need for bisulfite conversion. Methods are known in the art wherein a methylation sensitive restriction enzyme reagent, or a series of restriction enzyme reagents comprising methylation sensitive restriction enzyme reagents that distinguishes between methylated and non-methylated CpG dinucleotides within a target region are utilized in determining methylation, for example but not limited to DMH.

[0230] In the first step of such additional embodiments, the genomic DNA sample is isolated from tissue or cellular sources. Genomic DNA may be isolated by any means standard in the art, including the use of commercially available kits. Briefly, wherein the DNA of interest is encapsulated in by a cellular membrane the biological sample must be disrupted and lysed by enzymatic, chemical or mechanical means. The DNA solution may then be cleared of proteins and other contaminants, e.g., by digestion with proteinase K. The genomic DNA is then recovered from the solution. This may be carried out by means of a variety of methods including salting out, organic extraction or binding of the DNA to a solid phase support. The choice of method will be affected by several factors including time, expense and required quantity of DNA. All clinical sample types comprising neoplastic or potentially neoplastic matter are suitable for use in the present method, preferred are cell lines, histological slides, biopsies, paraffin-embedded tissue, body fluids, stool, colonic effluent, urine, blood plasma, blood serum, whole blood, isolated blood cells, cells isolated from the blood and combinations thereof. Body fluids are the preferred source of the DNA; particularly preferred are blood plasma, blood serum, whole blood, isolated blood cells and cells isolated from the blood.

[0231] Once the nucleic acids have been extracted, the genomic double-stranded DNA is used in the analysis.

[0232] In a preferred embodiment, the DNA may be cleaved prior to treatment with methylation sensitive restriction enzymes. Such methods are known in the art and may include both physical and enzymatic means. Particularly preferred is the use of one or a plurality of restriction enzymes which are not methylation sensitive, and whose recognition sites are AT rich and do not comprise CG dinucleotides. The use of such enzymes enables the conservation of CpG islands and CpG rich regions in the fragmented DNA. The non-methylation-specific restriction enzymes are preferably selected from the group consisting of MseI, BfaI, Csp6I, Tru1I, Tvu1I, Tru9I, Tvu9I, MaeI and XspI. Particularly preferred is the use of two or three such enzymes. Particularly preferred is the use of a combination of MseI, BfaI and Csp6I.

[0233] The fragmented DNA may then be ligated to adaptor oligonucleotides in order to facilitate subsequent enzymatic amplification. The ligation of oligonucleotides to blunt and sticky ended DNA fragments is known in the art, and is carried out by means of dephosphorylation of the ends (e.g. using calf or shrimp alkaline phosphatase) and subsequent ligation using ligase enzymes (e.g. T4 DNA ligase) in the presence of dATPs. The adaptor oligonucleotides are typically at least 18 base pairs in length.

[0234] In the third step, the DNA (or fragments thereof) is then digested with one or more methylation sensitive restriction enzymes. The digestion is carried out such that hydrolysis of the DNA at the restriction site is informative of the methylation status of a specific CpG dinucleotide of the Septin 9 gene.

[0235] Preferably, the methylation-specific restriction enzyme is selected from the group consisting of Bsi E1, Hga I HinPI, Hpy99I, Ava I, Bce AI, Bsa HI, BisI, BstUI, BshI236I, AccII, BstFNI, McrBC, GlaI, MvnI, HpaII (HapII), HhaI, AciI, SmaI, HinP1I, HpyCH4IV, EagI and mixtures of two or more of the above enzymes. Preferred is a mixture containing the restriction enzymes BstUI, HpaII, HpyCH4IV and HinP1I.

[0236] In the fourth step, which is optional but a preferred embodiment, the restriction fragments are amplified. This is preferably carried out using a polymerase chain reaction, and said amplificates may carry suitable detectable labels as discussed above, namely fluorophore labels, radionuclides and mass labels. Particularly preferred is amplification by means of an amplification enzyme and at least two primers comprising, in each case a contiguous sequence at least 16 nucleotides in length that is complementary to, or hybridizes under moderately stringent or stringent conditions to a sequence selected from the group consisting SEQ ID NO: 1 to SEQ ID NO: 3, and complements thereof. It is further preferred that said primers comprise, in each case a contiguous sequence at least 16 nucleotides in length that is complementary to, or hybridizes under moderately stringent or stringent conditions to SEQ ID NO: 159 or SEQ ID NO: 164 or most preferably, SEQ ID NO: 165, and complements thereof. Preferably said contiguous sequence is at least 16, 20 or 25 nucleotides in length. In an alternative embodiment said primers may be complementary to any adaptors linked to the fragments.

[0237] In the fifth step the amplificates are detected. The detection may be by any means standard in the art, for example, but not limited to, gel electrophoresis analysis, hybridisation analysis, incorporation of detectable tags within the PCR products, DNA array analysis, MALDI or ESI analysis. Preferably said detection is carried out by hybridisation to at least one nucleic acid or peptide nucleic acid comprising in each case a contiguous sequence at least 16 nucleotides in length that is complementary to, or hybridizes under moderately stringent or stringent conditions to a sequence selected from the group consisting SEQ ID NO: 1 to SEQ ID NO: 3, and complements thereof. It is further preferred that contiguous sequence is at least 16 nucleotides in length that is complementary to, or hybridizes under moderately stringent or stringent conditions to SEQ ID NO: 159 or SEQ ID NO: 164 or most preferably, SEQ ID NO: 165, and complements thereof. Preferably said contiguous sequence is at least 16, 20 or 25 nucleotides in length.

[0238] Subsequent to the determination of the methylation state or level of the genomic nucleic acids the presence, absence or class of cellular proliferative disorder is deduced based upon the methylation state or level of at least one CpG dinucleotide sequence of SEQ ID NO: 1 (or more preferably SEQ ID NO: 159 or SEQ ID NO: 164 or most preferably, SEQ ID NO: 165), or an average, or a value reflecting an average methylation state of a plurality of CpG dinucleotide sequences of SEQ ID NO: 1 (or more preferably SEQ ID NO: 159 or SEQ ID NO: 164 or most preferably, SEQ ID NO: 165) wherein methylation is associated with a neoplastic or pre-neoplastic cellular proliferative disorder. Wherein said methylation is determined by quantitative means the cut-off point for determining said the presence of methylation is preferably zero (i.e. wherein a sample displays any degree of methylation it is determined as having a methylated status at the analysed CpG position). Nonetheless, it is foreseen that the person skilled in the art may wish to adjust said cut-off value in order to provide an assay of a particularly preferred sensitivity or specificity. Accordingly said cut-off value may be increased (thus increasing the specificity), said cut off value may be within a range selected form the group consisting of 0%-5%, 5%-10%, 10%-15%, 15%-20%, 20%-30% and 30%-50%. Particularly preferred are the cut-offs 10%, 15%, 25%, and 30%.

[0239] In an alternative embodiment of the method wherein a panel of genes comprising the Septin 9 or its truncated transcript Q9HC74 and at least one gene selected from the group consisting FOXL2, NGFR, TMEFF2, SIX6, SARM1, VTN and ZDHHC22 subsequent to the determination of the methylation state of the genomic nucleic acids the presence, absence or subclass of cellular proliferative disorders, in particular liver and/or colorectal cell proliferative disorder is deduced based upon the methylation state of at least one CpG dinucleotide sequence of SEQ ID NO: 1 to 3 (or more preferably SEQ ID NO: 159 or SEQ ID NO: 164 or most preferably, SEQ ID NO: 165) and at least one CpG dinucleotide sequence of SEQ ID NO: 24 to SEQ ID NO: 29, or an average, or a value reflecting an average methylation state of a plurality of CpG dinucleotide sequences thereof wherein hypermethylation is associated with cancers, in particular liver and/or colorectal cancer.

### Diagnostic and Prognostic Assays for Cellular Proliferative Disorders

[0240] The present invention enables diagnosis of events which are disadvantageous to patients or individuals in which important genetic and/or epigenetic parameters within Septin 9 or its truncated transcript Q9HC74 may be used as markers. Said parameters obtained by means of the present invention may be compared to another set of genetic and/or epigenetic parameters, the differences serving as the basis for a diagnosis and/or prognosis of events which are disadvantageous to patients or individuals.

[0241] More specifically the present invention enables the screening of at-risk populations for the early detection of cancers, most preferably liver cancer and/or colorectal carcinomas. Furthermore, the present invention enables the differentiation of neoplastic (e.g. malignant) from benign (i.e. non-cancerous) cellular proliferative disorders. For example, it enables the differentiation of a colorectal carcinoma from small colon adenomas or polyps. Neoplastic cellular proliferative disorders present decreased methylation (i.e. decreased expression) within the Septin 9 gene, as opposed to said benign disorders which do not.

[0242] Specifically, the present invention provides for diagnostic and classification cancer assays based on measurement of differential expression (preferably methylation) of one or more CpG dinucleotide sequences of SEQ ID NO: 1, preferably sub-regions thereof according to SEQ ID NO: 2 or SEQ ID NO: 3 or more preferably Cp rich regions thereof according to SEQ ID NO: 159 or SEQ ID NO: 164 or most preferably, SEQ ID NO: 165 that comprise such a CpG dinucleotide sequence. Typically, such assays involve obtaining a sample from a subject, performing an assay to measure the expression of the Septin 9 gene, preferably by determining the methylation status of at least one CpG dinucleotide sequences of SEQ ID NO: 1 (preferably, sub-regions thereof according to SEQ ID NO: 2 or SEQ ID NO: 3 or more preferably SEQ ID NO: 159 or SEQ ID NO: 164 or most preferably, SEQ ID NO: 165), derived from the tissue sample, relative to a control sample, or a known standard and making a diagnosis based thereon.

[0243] In particular preferred embodiments, inventive oligomers are used to assess the CpG dinucleotide methylation status, such as those based on SEQ ID NO: 1 to SEQ ID NO: 15 or SEQ ID NO; 159 to SEQ ID NO: 173, or arrays thereof, as well as in kits based thereon and useful for the diagnosis and/or classification of cellular proliferative disorders.

### Kits

[0244] Moreover, an additional aspect of the present invention is a kit comprising: a means for determining Septin 9 methylation. The means for determining Septin 9 methylation comprise preferably a bisulfite-containing reagent; one or a plurality of oligonucleotides consisting whose sequences in each case are identical, are complementary, or hybridise under stringent or highly stringent conditions to a 9 or more preferably 18 base long segment of a sequence selected from SEQ ID NO: 4 to SEQ ID NO: 15 or more preferably SEQ ID NO; 160 to SEQ ID NO: 163; SEQ ID NO; 166 to SEQ ID NO: 173; and optionally instructions for carrying out and evaluating the described method of methylation analysis. In one embodiment the base sequence of said oligonucleotides comprises at least one CpG, CpA or TpG dinucleotide.

[0245] In a further embodiment, said kit may further comprise standard reagents for performing a CpG position-specific methylation analysis, wherein said analysis comprises one or more of the following techniques: MS-SNuPE, MSP, MethyLight™, HeavyMethyl, COBRA, and nucleic acid sequencing. However, a kit along the lines of the present invention can also contain only part of the aforementioned components.

[0246] In a preferred embodiment the kit may comprise additional bisulfite conversion reagents selected from the group consisting: DNA denaturation buffer; sulfonation buffer; DNA recovery reagents or kits (e.g., precipitation, ultrafiltration, affinity column); desulfonation buffer; and DNA recovery components.

[0247] In a further alternative embodiment, the kit may contain, packaged in separate containers, a polymerase and a reaction buffer optimised for primer extension mediated by the polymerase, such as PCR. In another embodiment of the invention the kit further comprising means for obtaining a biological sample of the patient. Preferred is a kit, which further comprises a container suitable for containing the means for determining methylation of the gene Septin 9 in the biological sample of the patient, and most preferably further comprises instructions for use and interpretation of the kit results. In a preferred embodiment the kit comprises: (a) a bisulfite reagent; (b) a container suitable for containing the said bisulfite reagent and the biological sample of the patient; (c) at least one set of primer oligonucleotides containing two oligonucleotides whose sequences in each case are identical, are complementary, or hybridise under stringent or highly stringent conditions to a 9 or more preferably 18 base long segment of a sequence selected from SEQ ID NO: 4 to SEQ ID NO: 15 or more preferably SEQ ID NO; 160 to SEQ ID NO: 163; SEQ ID NO; 166 to SEQ ID NO: 173; and optionally (d) instructions for use and interpretation of the kit results. In an alternative preferred embodiment the kit comprises: (a) a bisulfite reagent; (b) a container suitable for containing the said bisulfite reagent and the biological sample of the patient; (c) at least one oligonucleotides and/or PNA-oligomer having a length of at least 9 or 16 nucleotides which is identical to or hybridises to a pre-treated nucleic acid sequence according to one of SEQ ID NO: 4 to SEQ ID NO: 15 for more preferably SEQ ID NO; 160 to SEQ ID NO: 163; SEQ ID NO; 166 to SEQ ID NO: 173 and sequences complementary thereto; and optionally (d) instructions for use and interpretation of the kit results.

[0248] In an alternative embodiment the kit comprises: (a) a bisulfite reagent; (b) a container suitable for containing the said bisulfite reagent and the biological sample of the patient; (c) at least one set of primer oligonucleotides containing two oligonucleotides whose sequences in each case are identical, are complementary, or hybridise under stringent or highly stringent conditions to a 9 or more preferably 18 base long segment of a sequence selected from SEQ ID NO: 4 to SEQ ID NO: 15 or more preferably SEQ ID NO; 160 to SEQ ID NO: 163; SEQ ID NO; 166 to SEQ ID NO: 173; (d) at least one oligonucleotides and/or PNA-oligomer having a length of at least 9 or 16 nucleotides which is identical to or hybridises to a pre-treated nucleic acid sequence according to one of SEQ ID NO: 4 to SEQ ID NO: 15 or more preferably SEQ ID NO; 160 to SEQ ID NO: 163; SEQ ID NO; 166 to SEQ ID NO: 173 and sequences complementary thereto; and optionally (e) instructions for use and interpretation of the kit results.

[0249] The kit may also contain other components such as buffers or solutions suitable for blocking, washing or coating, packaged in a separate container.

[0250] Another aspect of the invention relates to a kit for use in determining the presence of and/or distinguishing between cell proliferative disorders, said kit comprising: a means for measuring the level of transcription of the gene Septin 9 and a means for determining Septin 9 methylation.

[0251] Typical reagents (e.g., as might be found in a typical COBRA™-based kit) for COBRA™ analysis may include, but are not limited to: PCR primers for Septin 9; restriction enzyme and appropriate buffer; gene-hybridization oligo; control hybridization oligo; kinase labeling kit for oligo probe; and labeled nucleotides. Typical reagents (e.g., as might be found in a typical MethyLight™-based kit) for MethyLight™ analysis may include, but are not limited to: PCR primers for the bisulfite converted sequence of the Septin 9 gene; bisulfite specific probes (e.g. TaqMan™ or Lightcycler™); optimized PCR buffers and deoxynucleotides; and Taq polymerase.

[0252] Typical reagents (e.g., as might be found in a typical Ms-SNuPE™-based kit) for Ms-SNuPE™ analysis may include, but are not limited to: PCR primers for specific gene (or bisulfite treated DNA sequence or CpG island); optimized PCR buffers and deoxynucleotides; gel extraction kit; positive control primers; Ms-SNuPE™ primers for the bisulfite converted sequence of the Septin 9 gene; reaction buffer (for the Ms-SNuPE reaction); and labelled nucleotides.

[0253] Typical reagents (e.g., as might be found in a typical MSP-based kit) for MSP analysis may include, but are not limited to: methylated and unmethylated PCR primers for the bisulfite converted sequence of the Septin 9 gene, optimized PCR buffers and deoxynucleotides, and specific probes.

[0254] Moreover, an additional aspect of the present invention is an alternative kit comprising a means for determining Septin 9 methylation, wherein said means comprise preferably at least one methylation specific restriction enzyme; one or a plurality of primer oligonucleotides (preferably one or a plurality of primer pairs) suitable for the amplification of a sequence comprising at least one CpG dinucleotide of a sequence selected from SEQ ID NO: 1 to 3 or more preferably SEQ ID NO: 159 or SEQ ID NO: 164 or most preferably, SEQ ID NO: 165; and optionally instructions for carrying out and evaluating the described method of methylation analysis. In one embodiment the base sequence of said oligonucleotides are identical, are complementary, or hybridise under stringent or highly stringent conditions to an at least 18 base long segment of a sequence selected from SEQ ID NO: 1 to SEQ ID NO: 3 or more preferably SEQ ID NO: 159 or SEQ ID NO: 164 or most preferably, SEQ ID NO: 165.

[0255] In a further embodiment said kit may comprise one or a plurality of oligonucleotide probes for the analysis of the digest fragments, preferably said oligonucleotides are identical, are complementary, or hybridise under stringent or highly stringent conditions to an at least 16 base long segment of a sequence selected from SEQ ID NO: 1 to SEQ ID NO: 3 or more preferably SEQ ID NO: 159 or SEQ ID NO: 164 or most preferably, SEQ ID NO: 165.

[0256] In a preferred embodiment the kit may comprise additional reagents selected from the group consisting: buffer (e.g. restriction enzyme, PCR, storage or washing buffers); DNA recovery reagents or kits (e.g., precipitation, ultrafiltration, affinity column) and DNA recovery components.

[0257] In a further alternative embodiment, the kit may contain, packaged in separate containers, a polymerase and a reaction buffer optimised for primer extension mediated by the polymerase, such as PCR. In another embodiment of the invention the kit further comprising means for obtaining a biological sample of the patient. In a preferred embodiment the kit comprises: (a) a methylation sensitive restriction enzyme reagent; (b) a container suitable for containing the said reagent and the biological sample of the patient; (c) at least one set of oligonucleotides one or a plurality of nucleic acids or peptide nucleic acids which are identical, are complementary, or hybridise under stringent or highly stringent conditions to an at least 9 base long segment of a sequence selected from SEQ ID NO: 1 to SEQ ID NO: 3 or more preferably SEQ ID NO: 159 or SEQ ID NO: 164 or most preferably, SEQ ID NO: 165; and optionally (d) instructions for use and interpretation of the kit results.

[0258] In an alternative preferred embodiment the kit comprises: (a) a methylation sensitive restriction enzyme reagent; (b) a container suitable for containing the said reagent and the biological sample of the patient; (c) at least one set of primer oligonucleotides suitable for the amplification of a sequence comprising at least one CpG dinucleotide of a sequence selected from SEQ ID NO: 1 to 3 or more preferably SEQ ID NO: 159 or SEQ ID NO: 164 or most preferably, SEQ ID NO: 165; and optionally (d) instructions for use and interpretation of the kit results.

[0259] In an alternative embodiment the kit comprises: (a) a methylation sensitive restriction enzyme reagent; (b) a container suitable for containing the said reagent and the biological sample of the patient; (c) at least one set of primer oligonucleotides suitable for the amplification of a sequence comprising at least one CpG dinucleotide of a sequence selected from SEQ ID NO: 1 to 3 or more preferably SEQ ID NO: 159 or SEQ ID NO: 164 or most preferably, SEQ ID NO: 165; (d) at least one set of oligonucleotides one or a plurality of nucleic acids or peptide nucleic acids which are identical, are complementary, or hybridise under stringent or highly stringent conditions to an at least 9 base long segment of a sequence selected from SEQ ID NO: 1 to SEQ ID NO: 3 or more preferably SEQ ID NO: 159 or SEQ ID NO: 164 or most preferably, SEQ ID NO: 165 and optionally (e) instructions for use and interpretation of the kit results.

[0260] The kit may also contain other components such as buffers or solutions suitable for blocking, washing or coating, packaged in a separate container.

[0261] The invention further relates to a kit for use in providing a diagnosis of the presence of a cell proliferative disorder in a subject by means of methylation-sensitive restriction enzyme analysis. Said kit comprises a container and a DNA microarray component. Said DNA microarray component being a surface upon which a plurality of oligonucleotides are immobilized at designated positions and wherein the oligonucleotide comprises at least one CpG methylation site. At least one of said oligonucleotides is specific for the gene Septin 9 and comprises a sequence of at least 15 base pairs in length but no more than 200 bp of a sequence according to one of SEQ ID NO: 1 to SEQ ID NO: 3 or more preferably SEQ ID NO: 159 or SEQ ID NO: 164 or most preferably, SEQ ID NO: 165. Preferably said sequence is at least 15 base pairs in length but no more than 80 by of a sequence according to one of SEQ ID NO: 1 to SEQ ID NO: 3 or more preferably SEQ ID NO: 159 or SEQ ID NO: 164 or most preferably, SEQ ID NO: 165. It is further preferred that said sequence is at least 20 base pairs in length but no more than 30 by of a sequence according to one of SEQ ID NO: 1 to SEQ ID NO: 3 or more preferably SEQ ID NO: 159 or SEQ ID NO: 164 or most preferably, SEQ ID NO: 165.

[0262] Said test kit preferably further comprises a restriction enzyme component comprising one or a plurality of methylation-sensitive restriction enzymes.

[0263] In a further embodiment said test kit is further characterized in that it comprises at least one methylation-specific restriction enzyme, and wherein the oligonucleotides comprise a restriction site of said at least one methylation specific restriction enzymes.

[0264] The kit may further comprise one or several of the following components, which are known in the art for DNA enrichment: a protein component, said protein binding selectively to methylated DNA; a triplex-forming nucleic acid component, one or a plurality of linkers, optionally in a suitable solution; substances or solutions for performing a ligation e.g. ligases, buffers; substances or solutions for performing a column chromatography; substances or solutions for performing an immunology based enrichment (e.g. immunoprecipitation); substances or solutions for performing a nucleic acid amplification e.g. PCR; a dye or several dyes, if applicable with a coupling reagent, if applicable in a solution; substances or solutions for performing a hybridization; and/or substances or solutions for performing a washing step. The described invention further provides a composition of matter useful for detecting, differentiation and distinguishing between colon cell proliferative disorders. Said composition comprising at least one nucleic acid 18 base pairs in length of a segment of the nucleic acid sequence disclosed in SEQ ID NO: 4 to SEQ ID NO: 15 or more preferably SEQ ID NO; 160 to SEQ ID NO: 163; SEQ ID NO; 166 to SEQ ID NO: 173, and one or more substances taken from the group comprising: 1-5 mM Magnesium Chloride, 100-500 μM dNTP, 0.5-5 units of taq polymerase, bovine serum albumen, an oligomer in particular an oligonucleotide or peptide nucleic acid (PNA)-oligomer, said oligomer comprising in each case at least one base sequence having a length of at least 9 nucleotides which is complementary to, or hybridizes under moderately stringent or stringent conditions to a pretreated genomic DNA according to one of the SEQ ID NO: 4 to SEQ ID NO: 15 or more preferably SEQ ID NO; 160 to SEQ ID NO: 163; SEQ ID NO; 166 to SEQ ID NO: 173 and sequences complementary thereto. It is preferred that said composition of matter comprises a buffer solution appropriate for the stabilization of said nucleic acid in an aqueous solution and enabling polymerase based reactions within said solution. Suitable buffers are known in the art and commercially available.

[0265] In further preferred embodiments of the invention said at least one nucleic acid is at least 50, 100, 150, 200, 250 or 500 base pairs in length of a segment of the nucleic acid sequence disclosed in SEQ ID NO: 4 to SEQ ID NO: 15 or more preferably SEQ ID NO; 160 to SEQ ID NO: 163; SEQ ID NO; 166 to SEQ ID NO: 173.

[0266] While the present invention has been described with specificity in accordance with certain of its preferred embodiments, the following examples serve only to illustrate the invention and are not intended to limit the invention within the principles and scope of the broadest interpretations and equivalent configurations thereof.

### EXAMPLES

### Example 1

[0267] In the following example a variety of assays suitable for the methylation analysis of SEQ ID NO: 1 were designed. The assays were designed to be run on the LightCycler platform (Roche Diagnostics), but other such instruments commonly used in the art are also suitable. The assays were MSP and HeavyMethyl assays. MSP amplificates were designed to be detected by means of Taqman style fluorescent labelled detection probes, HeavyMethyl amplificates were designed to be detected by means of Lightcycler style dual probes.

### Genomic Region of Interest:

### SEQ ID NO: 1

[0268] Assay type: MSP

### Primers:

| | |
|---|---|
| aaaatcctctccaacacgtc | SEQ ID NO: 121 |
| cgcgattcgttgtttattag | SEQ ID NO: 122 |

Taqman probes:

| | |
|---|---|
| cggatttcgcggttaacgcgtagtt | SEQ ID NO: 123 |

### Temperature Cycling Program:

| | | | |
|---|---|---|---|
| activation: | 95° C. | 10 min | |
| 55 cycles: | 95° C. | 15 sec | (20° C./s) |
| | 62° C. | 45 sec | (20° C./s) |
| cooling: | 40° C. | 5 sec | |

### Genomic Region of Interest:

### SEQ ID NO: 1

[0271] Assay type: MSP

### Primers:

| | |
|---|---|
| aaaatcctctccaacacgtc | SEQ ID NO: 124 |
| cgcgattcgttgtttattag | SEQ ID NO: 125 |

### Taqman Probes:

| | |
|---|---|
| cggatttcgcggttaacgcgtagtt | SEQ ID NO: 126 |

Temperature cycling profile:

| | | | |
|---|---|---|---|
| activation: | 95° C. | 10 min | |
| 55 cycles: | 95° C. | 15 sec | (20° C./s) |
| | 62° C. | 45 sec | (20° C./s) |

### Genomic Region of Interest:

### SEQ ID NO: 1

[0274] Assay type: HeavyMethyl

### Primers:

| | |
|---|---|
| gtagtagttagtttagtatttatttt | SEQ ID NO: 127 |
| cccaccaaccatcatat | SEQ ID NO: 128 |

### Blockers:

| | |
|---|---|
| catcatatcaaaccccacaatcaacacacaac | SEQ ID NO: 54 |

### Probes:

| | |
|---|---|
| gttcgaaatgattttatttagttgc | SEQ ID NO: 55 |
| cgttgatcgcggggttc | SEQ ID NO: 56 |

### Temperature Cycling Profile:

| | | | | |
|---|---|---|---|---|
| Activation | 95° C. | 10 min | | |
| 50 cycles | 95° C. | 10 sec | (20° C./s) | |
| | 56° C. | 30 sec | (20° C./s) | detection |
| | 72° C. | 10 sec | (20° C./s) | |
| Melting curve | 95° C. | 10 sec | | |
| | 40° C. | 10 sec | | |
| | 70° C. | 0 sec | | |
| Cooling | 40° C. | 5 sec | | |

### Genomic Region of Interest:

### SEQ ID NO: 1

[0279] Assay type: HeavyMethyl

### Primers:

| | |
|---|---|
| ggggagggttgtttatt | SEQ ID NO: 57 |
| cccctccctttaactct | SEQ ID NO: 58 |

### Blockers:

| | |
|---|---|
| ttaactctccccaacaactctcaaaccccac | SEQ ID NO: 59 |

### Probes:

| | |
|---|---|
| ttagtcggaggtgaggaacgattt | SEQ ID NO: 60 |
| ttatttcgttgtcgggtttaagcg | SEQ ID NO: 61 |

### Temperature Cycling Profile:

| | | | | |
|---|---|---|---|---|
| Activation | 95° C. | 10 min | | |
| 50 cycles | 95° C. | 10 sec | (20° C./s) | |
| | 56° C. | 30 sec | (20° C./s) | detection |
| | 72° C. | 10 sec | (20° C./s) | |
| Melting curve | 95° C. | 10 sec | | |
| | 40° C. | 10 sec | | |
| | 70° C. | 0 sec | | |
| Cooling | 40° C. | 5 sec | | |

### Example 2

[0284] The following analysis was performed in order to select preferred panels suitable for colorectal carcinoma screening and/or diagnosis based on analysis of DNA methylation within whole blood, said panel comprising at least the analysis of SEQ ID NO: 1. The best performing assays from Example 1 were selected for the analyses, in addition to methylation assays suitable for analysis of the genes according to SEQ ID NO: 24 to SEQ ID NO: 27 of Table 1.

[0285] The performance of each marker was analysed using an assay platform (Lightcycler) and real time assays (MSP and/or HeavyMethyl) as would be suitable for use in a reference or clinical laboratory setting. The performance of each marker was tested independently in colorectal carcinoma tissue and whole blood, in order to provide an indication of the accuracy of each marker.

[0286] In addition to the analysis of SEQ ID NO: 1 the panels comprised further genes selected from the group of markers consisting:

| | |
|---|---|
| FOX2 | (SEQ ID NO: 24) |
| NGFR | (SEQ ID NO: 25) |
| TMEFF2 | (SEQ ID NO: 26) |
| SIX6 | (SEQ ID NO: 27) |

[0287] Each marker was analysed by means of at least one methylation specific assay, namely MSP and/or HeavyMethyl, as shown in Table 2.

[0288] A further assay (not methylation specific), hereinafter referred to as the C3 assay was performed in order to quantify the total amount of DNA in each sample. The C3 assay is a bisulfite DNA assay that detects total DNA irrespective of methylation state. The following primers and probes were used:

| | |
|---|---|
| Primer: | |
| GGAGTGGAGGAAATTGAGAT | SEQ ID NO: 62 |
| Primer: | |
| CCACACAACAAATACTCAAAAC | SEQ ID NO: 63 |
| Probe: | |
| TGGGTGTTTGTAATTTTTGTTTTGTGTTAGGTT | SEQ ID NO: 64 |

[0289] Each assay was run in duplicate on colorectal carcinoma, normal adjacent tissue and/or whole blood samples as shown in Table 3.

[0290] DNA extraction was carried out using commercially available kits, and bisulfite conversion was carried out with minor modifications according to the method described in Olek et al. (1996).

[0291] All assays (C3 and methylation specific) were performed using the Lightcycler platform.

### Data Interpretation

[0292] Calculation of DNA concentration.

[0293] The Cp (crossing point values) and intensity curves as calculated by the Lightcycler instrument software were used to determine DNA concentration. The DNA concentration was calculated by reference of the CP value of each well to a standard curve for both the methylation assays and the C3 assay.

### Sample Replicates

[0294] In most cases each assay was run twice per sample, resulting in multiple measurements per sample. For each sample a score is calculated as follows:
[0295] 1. Calculate the ratio v1/v2 for all sample pairs
[0296] 2. If both are below a threshold of 0.1 ng, the ratio is set to =, if one is = and the other is above threshold, set the ratio to 100
[0297] 3. For each assay samples whose ratio exceeds 2.5 are not analysed further
[0298] 4. For samples not having exactly two replicates the average is taken without taking any scores

### Percentage Methylation

[0299] All samples that measured less than 1 ng DNA using the C3 assay were not further considered. For each sample the detected percentage methylation was calculated as the measured concentration of DNA quantified using the methylation assays over the concentration of DNA in the sample as quantified by the C3 assay.

[0300] Detection of methylation was determined at three different threshold levels, see tables) as well as at all methylation levels (i.e. any samples wherein methylation was detected were deemed positive).

[0301] The sensitivity of each assay was determined from the colorectal carcinoma sample positive detection rate, wherein sensitivity was determined as the % samples wherein methylation was positively detected (i.e. true positives).

[0302] The specificity of each assay was determined from the whole blood sample negative detection rate (i.e. true negative detection rate) wherein false positives were discounted from the total number of analysed samples.

### Results

[0303] The proportion of the analysed samples with methylation measured within various thresholds by individual assays are shown in Table 4 (colorectal carcinoma tissue), 5 (normal adjacent tissue) and 6 (whole blood).

[0304] Furthermore, sensitivity plots, specificity plots and ROC curves for SEQ ID NO: 1 (Assay 2) are shown in FIG. 2, illustrating the significance of the difference in methylation between colorectal carcinoma tissue and whole blood, and in some cases normal adjacent tissues. The AUC of each ROC plot and the Wilcoxon p-value are shown in Table 12.

### Stage

[0305] A further analysis of the colorectal carcinoma results according to stage of the carcinoma is shown in Table 7. In said table marker sensitivity based on two different methylation thresholds (>10% and >20%) is shown for all stages of CRC. For most markers, sensitivity is uniform across all CRC stages so these markers would be suitable for detection of all stages of CRC in a screening or monitoring test. There seems to be a trend for higher sensitivity in Stage II cancers. The less sensitive, more specific markers tend to identify earlier stage cancers (e.g. FOX2 (Assay 3)) and could add to the sensitivity of a screening/monitoring test but also may be useful for other applications (biopsies, stool tests, etc).

### Panel

[0306] The proportion of the analysed samples with methylation measured within various thresholds by combinations of assays in colorectal carcinoma and whole blood is shown in Table 8-11. In each case, the tables show the proportion of samples within the given threshold, and additionally, the gain in detected samples of using both markers, as opposed to only the first marker.

### Example 3

[0307] The following analysis was performed in order to confirm the gene Septin 9, (including its transcript variant Q9HC74) and panels thereof as a suitable marker for colorectal carcinoma screening and/or diagnosis based on analysis of DNA methylation in whole blood by validating the performance of assays in a large sample set.

[0308] The performance of the marker was analysed using an assay platform (Lightcycler) and real time assays (MSP and/or HeavyMethyl) as would be suitable for use in a reference or clinical laboratory setting. The performance of each marker was tested independently in colorectal tissue (normal adjacent tissue), colorectal carcinoma tissue and whole blood, in order to provide an indication of the accuracy of the marker.

[0309] The following primers and probes were used:

[0310] SEQ ID NO: 1 (Assay 7) using the Lightcycler probes according to Table 2 was performed using the following protocol:

| | |
|---|---|
| water | Fill up to final |
| | volume of 10 μl |
| MgCl2 | 3.5 |
| Primer forward | 0.3 |
| Primer reverse | 0.3 |
| Blocker | 4 |
| detect. Probe (fluo) | 0.15 |
| detect. Probe (red) | 0.15 |
| 1a + 1b reagent FastStart mix | 1 |
| DNA | |

### LightCycler Program:

| | | | | |
|---|---|---|---|---|
| activation: | 95° C. | 10 min | | |
| 55 cycles: | 95° C. | 10 sec | (20° C./s) | |
| | 56° C. | 30 sec | (20° C./s) | detection |
| | 72° C. | 10 sec | (20° C./s) | |
| melting curve: | 95° C. | 10 sec | 20 | |
| | 40° C. | 10 sec | 20 | |
| | 70° C. | 0 sec | 0.1 | |
| cooling: | 40° C. | 5 sec | | |

[0312] SEQ ID NO: 1 (Assay 7) using the Taqman probes according to Table 2 was performed using the following protocol:

protocol:

| | |
|---|---|
| water | Fill up to final |
| | volume of 10 μl |
| MgCl2 | 3.5 |
| Primer 1 | 0.3 |
| Primer 2 | 0.3 |
| Blocker | 4 |
| TaqMan probe | 0.15 |
| 1a + 1b reagent (FastStart) | 1 |
| DNA | 10 μl |

### Cycling Conditions

| | | | | |
|---|---|---|---|---|
| activation: | 95° C. | 10 min | | |
| 50 cycles: | 95° C. | 10 sec | (20° C./s) | |
| | 56° C. | 30 sec | (20° C./s) | detection |
| | 72° C. | 10 sec | (20° C./s) | |
| melting curve: | 95° C. | 10 sec | 20 | |
| | 40° C. | 10 sec | 20 | |
| | 70° C. | 0 sec | 0.1 | |
| cooling: | 40° C. | 5 sec | | |

[0314] The C3 assay was performed in order to quantify the total amount of DNA in each sample. The C3 assay was performed as above in Example 2.

[0315] Each assay was run in duplicate on colorectal carcinoma, normal adjacent tissue and/or whole blood samples. Two sets of samples were analysed, sample set 1 as shown in Table 13 and sample set 2 as shown in Table 14.

[0316] Sample set 1 was analysed using the following assays detailed in Table 2:

### SEQ ID NO: 1 (Assay 2)

### SEQ ID NO: 26 (Assay 6)

### SEQ ID NO: 24 (Assay 5)

### SEQ ID NO: 25 (Assay 3)

[0317] Sample set 2 was analysed using the following assays as detailed in Table 2:

SEQ ID NO: 1 (Assay 7) both LightCycler (LC) and Taqman (Taq) variants and the following assays SEQ ID NO: 28 (Assay 2)

### SEQ ID NO: 24 (Assay 5b)

[0318] SEQ ID NO: 29 (Assay 2b) as detailed in Table 17.

[0319] Only samples with greater than 4 ng of DNA were analysed. In sample set 1 27 blood samples and 91 colorectal cancer samples were analysed. In sample set 2 26 blood samples 22 non-adjacent colorectal tissue samples and 81 colorectal cancer samples were analysed.

[0320] All assays (C3 and methylation specific) were performed using the Lightcycler platform.

### DNA Extraction and Bisulfite Treatment

[0321] The DNA was isolated from the all samples by means of the Magna Pure method (Roche) according to the manufacturer's instructions. The eluate resulting from the purification was then converted according to the following bisulfite reaction. The eluate was mixed with 354 μl of bisulfite solution (5.89 mol/l) and 146 μl of dioxane containing a radical scavenger (6-hydroxy-2,5,7,8-tetramethylchromane 2-carboxylic acid, 98.6 mg in 2.5 ml of dioxane). The reaction mixture was denatured for 3 min at 99° C. and subsequently incubated at the following temperature program for a total of 7 h min 50° C.; one thermospike (99.9° C.) for 3 min; 1.5 h 50° C.; one thermospike (99° C.) for 3 min; 3 h 50° C. The reaction mixture was subsequently purified by ultrafiltration using a Millipore Microcon™ column. The purification was conducted essentially according to the manufacturer's instructions. For this purpose, the reaction mixture was mixed with 300 μl of water, loaded onto the ultrafiltration membrane, centrifuged for 15 min and subsequently washed with 1×TE buffer. The DNA remains on the membrane in this treatment. Then desulfonation is performed.

[0322] For this purpose, 0.2 mol/l NaOH was added and incubated for 10 min. A centrifugation (10 min) was then conducted, followed by a washing step with 1×TE buffer. After this, the DNA was eluted. For this purpose, the membrane was mixed for 10 minutes with 75 μl of warm 1×TE buffer (50° C.). The membrane was turned over according to the manufacturer's instructions. Subsequently a repeated centrifugation was conducted, with which the DNA was removed from the membrane. 10 μl of the eluate was utilized for the Lightcycler Real Time PCR assay.

### Reaction Solutions and Thermal Cycling Conditions

### SEQ ID NO: 26 Assay 6 (HeavyMethyl Assay)

### Reaction Solution:

| | |
|---|---|
| water | |
| MgCl2 | 3.50 mM (buffer include 1 mM!) |
| Primer mix | 0.30 μM (each) |
| Blocker | 4.00 μM |
| detect. probes mix | 0.15 μM (each) |
| 1a + 1b reagent FastStart mix | 1.00 x |

### Thermal Cycling Conditions:

| | | | | |
|---|---|---|---|---|
| activation: | 95° C. | 10 min | | |
| 55 cycles: | 95° C. | 10 sec | (20° C./s) | |
| | 56° C. | 30 sec | (20° C./s) | detection |
| | 72° C. | 10 sec | (20° C./s) | |
| melting curve: | 95° C. | 10 sec | 20 | |
| | 40° C. | 10 sec | 20 | |
| | 70° C. | 0 sec | 0.1 | |
| cooling: | 40° C. | 5 sec | | |

### SEQ ID NO: 25 Assay 3 (HeavyMethyl Assay)

### Reaction Solution:

| | |
|---|---|
| water | |
| MgCl2 | 3.50 mM (buffer include 1 mM!) |
| Primer mix | 0.30 μM (each) |
| Blocker | 4.00 μM |
| detect. probes mix | 0.15 μM (each) |
| 1a + 1b reagent FastStart mix | 1.00 x |

### Thermal Cycling Conditions:

| | | | | |
|---|---|---|---|---|
| activation: | 95° C. | 10 min | | |
| 55 cycles: | 95° C. | 10 sec | (20° C./s) | |
| | 56° C. | 30 sec | (20° C./s) | detection |
| | 72° C. | 10 sec | (20° C./s) | |
| melting curve: | 95° C. | 10 sec | 20 | |
| | 40° C. | 10 sec | 20 | |
| | 70° C. | 0 sec | 0.1 | |
| cooling: | 40° C. | 5 sec | | |

### SEQ ID NO: 24 Assay 5B (HeavyMethyl Assay)

### Reaction Solution:

| | |
|---|---|
| water | |
| MgCl2 | 3.00 MM * |
| Primer forward | 0.30 μM |
| Primer reverse | 0.30 μM |
| Blocker | 4.00 μM |
| detect. probes fluo | 0.15 μM |
| detect. probes red | 0.15 μM |
| 1a + 1b reagent mix | 1.00 x |

### Thermal Cycling Conditions:

| denat at 95° C. | | | |
|---|---|---|---|
| 95° C. | 10 min | | |
| 55 cycles: | | | |
| denat at 95° C. | 10 sec | (20° C./s) | |
| Annealing 58° C. | 30 sec | (20° C./s) | detection |
| extension 72° C. | 10 sec | (20° C./s) | |
| melting | | | |
| 95° C. | 10 sec | 20 | |
| 35° C. | 20 sec | 20 | |
| 95° C. | 0 sec | 0.1 | |

### SEQ ID NO: 24 Assay 5 (HeavyMethyl Assay)

### Reaction Solution:

| | |
|---|---|
| water | |
| MgCl2 | 3.00 mM (buffer include mM!) |
| Primer forward | 0.30 μM |
| Primer reverse | 0.30 μM |
| Blocker | 4.00 μM |
| LightCycler Probe | 0.15 μM |
| LightCycler Probe | 0.15 μM |
| 1a + 1b reagent mix | 1.00 x |

### Thermal Cycling Conditions:

| denat at 95° C. | | | |
|---|---|---|---|
| 95° C. | 10 min | | |
| 55 cycles: | | | |
| denat at 95° C. | 10 sec | (20° C./s) | |
| Annealing 58° C. | 30 sec | (20° C./s) | detection |
| extension 72° C. | 10 sec | (20° C./s) | |
| melting | | | |
| 95° C. | 10 sec | 20 | |
| 35° C. | 20 sec | 20 | |
| 95° C. | 0 sec | 0.1 | |

### SEQ ID NO: 1 Assay 2 (MSP Assay)

### Reaction Solution:

| | |
|---|---|
| Water (3315932) | |
| MgCl2 (2239272) | 3.50 MM (*) |
| Primer forward | 0.60 μM |
| Primer reverse | 0.60 μM |
| detect. Probe | 0.30 μM |
| 1a + 1b reagent FastStart mix | 1.00 x |

### Thermal Cycling Conditions:

| | | |
|---|---|---|
| activation: | 95° C. | 10 min |
| 50 cycles: | 95° C. | 15 sec |
| | 62° C. | 45 sec |
| cooling: | 40° C. | 5 sec |

### SEQ ID NO: 1 Assay 7 (LightCycler Probe HeavyMethyl Assay)

### Reaction Solution:

| | |
|---|---|
| water | |
| MgCl2 | 3.50 mM (buffer include mM!) |
| Primer 1 | 0.30 μM |
| Primer 2 | 0.30 μM |
| Blocker | 4.00 μM |
| detect. Probe (fluo) | 0.15 μM |
| detect. Probe (red) | 0.15 μM |
| 1a + 1b reagent (FastStart) | 1.00 x |

### Thermal Cycling Conditions:

| | | | | |
|---|---|---|---|---|
| activation: | 95° C. | 10 min | | |
| 50 cycles: | 95° C. | 10 sec | (20° C./s) | |
| | 56° C. | 30 sec | (20° C./s) | detection |
| | 72° C. | 10 sec | (20° C./s) | |
| melting curve: | 95° C. | 10 sec | 20 | |
| | 40° C. | 10 sec | 20 | |
| | 70° C. | 0 sec | 0.1 | |
| cooling: | 40° C. | 5 sec | | |

### SEQ ID NO: 1 Assay 7 (Taqman HeavyMethyl Assay)

### Reaction Solution:

| | |
|---|---|
| water | |
| MgCl2 | 3.50 mM (buffer include mM!) |
| Primer 1 | 0.30 μM |
| Primer 2 | 0.30 μM |
| Blocker | 4.00 μM |
| detection probe 1 | 0.15 μM |
| detection probe 2 | 0.15 μM |
| 1a + 1b reagent mix | 1.00 x |

### Thermal Cycling Conditions:

| | | | | |
|---|---|---|---|---|
| activation: | 95° C. | 10 min | | |
| 50 cycles: | 95° C. | 10 sec | (20° C./s) | |
| | 56° C. | 30 sec | (20° C./s) | detection |
| | 72° C. | 10 sec | (20° C./s) | |
| melting curve: | 95° C. | 10 sec | 20 | |
| | 40° C. | 10 sec | 20 | |
| | 70° C. | 0 sec | 0.1 | |
| cooling: | 40° C. | 5 sec | | |

### SEQ ID NO: 28 Assay 2 (HeavyMethyl Assay)

### Reaction Solution:

| | |
|---|---|
| water | |
| MgCl2 | 3.50 mM (buffer include mM!) |
| Primer 1 | 0.30 μM |
| Primer 2 | 0.30 μM |
| Blocker | 4.00 μM |
| detection probe 1 | 0.15 μM |
| detection probe 2 | 0.15 μM |
| 1a + 1b reagent mix | 1.00 x |

### Thermal Cycling Conditions:

| | | | | |
|---|---|---|---|---|
| activation: | 95° C. | 10 min | | |
| 50 cycles: | 95° C. | 10 sec | (20° C./s) | |
| | 56° C. | 30 sec | (20° C./s) | detection |
| | 72° C. | 10 sec | (20° C./s) | |
| melting curve: | 95° C. | 10 sec | 20 | |
| | 40° C. | 10 sec | 20 | |
| | 70° C. | 0 sec | 0.1 | |
| cooling:_{—} | 40° C. | 5 sec | | |

### SEQ ID NO: 29 Assay 2B (HeavyMethyl Assay)

### Reaction Solution:

| | |
|---|---|
| water | |
| MgCl2 | 3.00 mM (buffer include mM!) |
| Primer 1 | 0.30 μM |
| Primer 2 | 0.30 μM |
| Blocker | 4.00 μM |
| detect. Probe (fluo) | 0.15 μM |
| detect. Probe (red) | 0.15 μM |
| 1a + 1b reagent (FastStart) | 1.00 x |

### Thermal Cycling Conditions:

| activation: | 95° C. | 10 min | | |
|---|---|---|---|---|
| 50 cycles: | 95° C. | 10 sec | (20° C./s) | |
| | 58° C. | 30 sec | (20° C./s) | detection |
| | 72° C. | 10 sec | (20° C./s) | |
| melting curve: | 95° C. | 10 sec | 20 | |
| | 40° C. | 10 sec | 20 | |
| | 70° C. | 0 sec | 0.1 | |

### SEQ ID NO: 29 Assay 2 (HeavyMethyl Assay)

### Reaction Solution:

| | |
|---|---|
| water | |
| MgCl2 | 3.50 mM (buffer include mM!) |
| Primer 1 | 0.30 μM |
| Primer 2 | 0.30 μM |
| Blocker | 4.00 μM |
| detection probe 1 | 0.15 μM |
| detection probe 2 | 0.15 μM |
| 1a + 1b reagent mix | 1.00 x |

### Thermal Cycling Conditions:

| | | | | |
|---|---|---|---|---|
| activation: | 95° C. | 10 min | | |
| 55 cycles: | 95° C. | 10 sec | (20° C./s) | |
| | 56° C. | 30 sec | (20° C./s) | detection |
| | 72° C. | 10 sec | (20° C./s) | |
| melting curve: | 95° C. | 10 sec | 20 | |
| | 40° C. | 10 sec | 20 | |
| | 70° C. | 0 sec | 0.1 | |
| cooling: | 40° C. | 5 sec | | |

### Data Interpretation

### Calculation of DNA Concentration.

[0343] The Cp (crossing point values) as calculated by the Lightcycler instrument software were used to determine DNA concentration. The DNA concentration was calculated by reference of the CP value of each well to a standard curve for both the methylation assays and the C3 assay.

[0344] In most cases each assay was run twice per sample, resulting in multiple measurements per sample.

### Percentage Methylation

[0345] All samples that measured less than 4 ng DNA using the C3 assay were not further considered. For each sample the detected percentage methylation was calculated as the measured concentration of DNA quantified using the methylation assays over the concentration of DNA in the sample as quantified by the C3 assay.

[0346] Detection of methylation was determined at multiple different threshold levels, see tables) as well as at all methylation levels (i.e. any samples wherein methylation was detected were deemed positive).

[0347] The sensitivity of each assay was determined from the colorectal carcinoma sample positive detection rate, wherein sensitivity was determined as the % samples wherein methylation was positively detected (i.e. true positives).

[0348] The specificity of each assay was determined from the whole blood sample negative detection rate (i.e. true negative detection rate) wherein false positives were discounted from the total number of analysed samples.

### Results

[0349] The proportion or number of the analysed samples with methylation measured within a given threshold by individual assays are shown in Tables 15 (Sample set 1) and in Table 16 (Sample set 2). Wherein at least one of the two replicates tested positive within a given threshold the sample was considered as positive. The panel data was compiled by determining the proportion or number of the analysed samples with methylation measured within a given threshold using at least one assay of the panel. Wherein at least one of the two replicates tested positive within a given threshold the sample was considered as positive.

[0350] SEQ ID NO: 1 Assay 2 was further tested in a set of 14 breast cancer samples, 12 colorectal cancer samples and 10 whole blood samples (Sample set 3). The proportion or number of the analysed samples with methylation measured within a given threshold by individual assays are shown in Tables 18.

### Example 4

### Other Cancers

[0351] The following analysis was performed in order to confirm the gene Septin 9, (including its transcript variant Q9HC74) and panels thereof as a suitable marker for the screening and/or diagnosis of other cancers, based on analysis of DNA methylation in whole blood by validating the performance of assays in a large sample set.

[0352] The performance of the marker was analysed using HeavyMethyl Assay 7 of SEQ ID NO: 1 according to Table 2, reactions conditions were as according to Example 2.

[0353] Table 20 shows the number of samples tested in each class, and the number of samples wherein both replicates tested positive for methylation. FIG. 3 shows the methylation levels measured in other cancers, as can be seen the gene is methylated across multiple cancer types. However, only liver cancer is methylated at equal or higher rates than colorectal cancer. FIG. 4 shows the methylation levels measured in other non-cancerous diseases, as can be seen only pyelonephritis is methylated at equal or higher rates than colorectal cancer.

### Example 5

### Bisulfite Sequencing

### Sequencing of the Septin 9 Gene

[0354] It has been postulated that the gene Septin 9 has from 4 (see previous discussion regarding the Ensembl database) to at least 6 different transcript variants (at the 5′ end, see Russell et al. Oncogene. 2001 Sep. 13; 20(41):5930-9). Of the variants referred to by Russell et al. amplicons were designed to cover the CpG islands or CpG rich regions covering for 4 variants (alpha, beta, gamma and epsilon). There are 2 CpG islands overlapping 2 of the variants, epsilon and gamma. The beta variant appears to be regulated by the gamma CPG island.

[0355] Samples from 12 patients were analysed, the level of Septin 9 methylation having been previously quantified by means of HeavyMethyl assay, as described above. Two samples had greater than 20% methylation (Sample C group), 4 samples had 10% to 20% methylation (Sample B group) and 6 samples had previously displayed up to 10% methylation (Sample A group).

[0356] Furthermore, DNA of 3 whole blood samples from subjects with no apparent disease was also used for alpha and beta amplicons (Sample N group).

### DNA Extraction and Bisulfite Treatment

[0357] DNA was isolated with QIAGEN Genomic-Tip 500/G or 100/G according to the manufacturer's instructions. The purified genomic DNA was then converted according to the following bisulfite reaction.

[0358] 2 ug of DNA in 100 ul was mixed with 354 μl of bisulfite solution (10.36 g sodium bisulfite & 2.49 g sodium sulfite in 22 ml nuclease-free water) and 146 μl of dioxane containing a radical scavenger (6-hydroxy-2,5,7,8-tetramethylchromane 2-carboxylic acid, 323 mg in 8.2 ml of dioxane). The bisulfite reaction was as follows:

| Time | | Speed | Action |
|---|---|---|---|
| 3 | min | | Water bath 99.9° C. |
| 30 | min | 1000 rpm | Thermomixer 60° C. |
| 3 | min | | Water bath 99.9° C. |
| 1.5 | hour | 1000 rpm | Thermomixer 60° C. |
| 3 | min | | Water bath 99.9° C. |
| 3 | hour | 1000 rpm | Thermomixer 60° C. |

[0359] The reaction mixture was subsequently purified by ultrafiltration using a Millipore Microcon™ column. The purification was conducted according to the manufacturer's instructions. More specifically for desulfonation and washing:

| Time | Volume | Speed | Action |
|---|---|---|---|
| | 200 μl | | Sterile water to bisulfite reaction; mix, vortex & spin |
| | 400 μl | | Bisulfite mix to Microcon column |
| 20 min | | 14,000 g | Discard tube with flow through; replace with new tube |
| | 400 μl | | Remaining bisulfite mix to the same Microcon filter |
| 20 min | | 14,000 g | Discard tube with flow through; replace with new tube |
| | 400 μl | | 0.2 M NaOH |
| 12 min | | 14,000 g | Discard tube with flow through; replace with new tube |
| | 400 μl | | 0.1 M NaOH |
| 12 min | | 14,000 g | Discard tube with flow through; replace with new tube |
| | 400 μl | | ddH₂O |
| 12 min | | 14,000 g | Discard tube with flow through; replace with new tube |
| | 400 μl | | ddH₂O |
| 12 min | | 14,000 g | Discard tube with flow through; replace with new tube |

[0360] Then 50 μl of Bisulfite TE buffer (pre-warmed to 50° C.; 0.1 mM EDTA in 10 mM Tris) was added to the membrane and incubated for 10 min under agitation (1000 rpm). The column was inverted into a 1.7 ml low-retention tube and spun at 1000 g for 7 minutes to elute the DNA. The DNA concentration was determined by a control gene (HB14) real-time PCR assay.

### Amplification

[0361] See Table 21 for amplicons and PCR primers. Amplicons with “rc” in their names were amplified from the Bis2 strand, others from the Bis1 strand.

[0362] Fragments of interest were amplified using the following conditions in 25 ul reactions.

### PCR Reaction:

| | 1x volume | | |
|---|---|---|---|
| | (ul) | Final conc. | |
| 10X DyNAzyme EXT buffer w/MgCl₂ | 2.5 | 1X | |
| 2 mM dNTPs | 2.5 | 200 uM | each |
| Rev/For primer combo (10uM stock) | 1.25 | 0.5 uM | each |
| DyNAzyme EXT polymerase 1 U/ul | 0.5 | 0.5 unit | total |
| Bisulfite Treated DNA (@10 ng/ul) | 2.5-5 | 25-50 ng | total |
| DMSO 100% | 0-0.5 | 0-2% | |

### Cycling Conditions:

[0364] 3 min 94° C.; 20 s 94° C.; 30 s 54° C.; 45 s 72° C. (3842 cycles); 10 min 72° C.

### Purification of the PCR Product

[0365] PCR product was purified with the Montage™ DNA Gel Extraction Kit according the manufacturer's instruction. In brief, PCR reaction was run on 1% modified TAE (containing 0.1 mM EDTA instead of the 1.0 mM EDTA in standard TAE) agarose gel. The DNA band of interest was cut and excised. The gel slice was place in a Montage DNA gel Extraction Device, and span at 5000 g for 10 minutes to collect the DNA solution. The purified DNA was further concentrated to 10 ul.

### TA Cloning

[0366] The PCR product was cloned and propagated with the Invitrogen TOPO® TA Cloning kit according to manufacturer's instruction. In brief, 2 ul of purified and concentrated PCR product was used in a TOPO cloning reaction to clone it into the vector pCR® 2.1-TOPO. Transformation was done with the chemically competent E. coli strain TOP10.

### Sequencing

[0367] Individual colonies were picked and cultured in LB (50 ug Carbenicillin/ml LB for selection). 1 ul of overnight culture were used for colony PCR in a 20 ul volume:

### PCR mix

[0368] 2.5 ul 10× DyNAzyme buffer
2.5 ul 2 mM dNTPs
1.25 ul M13 F primer (10 uM)
1.25 ul M13R primer (10 uM)

### 0.25 ul DyNAzyme Polymerase

[0369] 12.25 ul ddH2O

### Cycling Conditions:

[0370] 3 min 94° C.; 1 min 94° C.; 1 min 55° C.; 1 min 72° C. (36 cycles); 10 min 72° C.

[0371] Colony PCR amplicon purification and sequencing reads were done using standard protocols. Sequencing primers used were either M13 reverse primer or one of the amplicon specific primers that generated the initial PCR product.

### Results

[0372] FIGS. 5 to 29 provide matrices produced from bisulfite sequencing data of the gamma amplicon analyzed by the applicant's proprietary software (See WO 2004/000463 for further information). Each column of the matrices represents the sequencing data for a replicate of one sample, all replicates of each sample are grouped together in one block. Each row of a matrix represents a single CpG site within the fragment. The CpG number of the amplificate is shown to the left of the matrices.

[0373] The amount of measured methylation at each CpG position is represented by colour from light grey (0% methylation), to medium grey (50% methylation) to dark grey (100% methylation). Some amplificates, samples or CpG positions were not successfully sequenced and these are shown in white.

[0374] FIGS. 5 to 29 provide matrices of the bisulfite sequencing data according to Example 5. Each column of the matrices represents the sequencing data for a replicate of one sample, all replicates of each sample are grouped together in one block. Each row of a matrix represents a single CpG site within the fragment. The CpG number of the amplificate is shown to the left of the matrices.

[0375] The amount of measured methylation at each CpG position is represented by colour from light grey (0% methylation), to medium grey (50% methylation) to dark grey (100% methylation). Some amplificates, samples or CpG positions were not successfully sequenced and these are shown in white.

[0376] FIGS. 5 to 12 provide an overview of the sequencing of the bisulfite converted amplificates of the genomic sequence according to Table 21 in 4 samples that had previously been quantified (by HeavyMethyl assay) as having between 10% and 20% methylation.

[0377] FIGS. 13 to 20 provide an overview of the sequencing of the bisulfite converted amplificate of the genomic sequence according to Table 21 in 2 samples that had previously been quantified (by HeavyMethyl assay) as having greater than 20% methylation.

[0378] FIGS. 21 to 22 provide an overview of the sequencing of the bisulfite converted amplificate of the genomic sequence according to Table 21 in blood samples from 3 healthy subjects.

[0379] FIGS. 23 to 29 provide an overview of the sequencing of the bisulfite converted amplificate of the genomic sequence according to Table 21 in 6 samples that had previously been quantified (by HeavyMethyl assay) as having less than 10% (but greater than 0%) methylation.

[0380] FIGS. 30 to 38 provide an overview of all analysed samples, separated according to level of HM quantified methylation, and also showing the level of methylation in normal whole blood (“NWB”).

### Discussion

[0381] Bisulfite sequence analysis of the Septin 9 promoter revealed differential methylation of colorectal cancer tissue in 3 of 4 regions. The CpG island overlapping with Septin 9 (gamma variant) is disclosed in SEQ ID NO: 159 and is one of the preferred sites for a PCR based sensitive methylation assay for colorectal cancer early detection test as it shows extensive co-methylation in colorectal cancer tissue with virtually no methylation present in DNA from healthy whole blood specimen.

[0382] An alternative preferred site for a PCR based sensitive methylation assay for colorectal cancer early detection is within the CpG rich region that is associated within region of the beta transcript variant. Said region is disclosed in SEQ ID NO: 164.

[0383] The CpG rich regions associated with the gamma (SEQ ID NO: 159) and beta (SEQ ID NO: 164) variant transcripts, are concurrently located within the Septin 9 gene, and are separated by a low CpG density sequence of approximately 360 bases, SEQ ID NO: 165 provides a particularly preferred region of the Septin 9 gene the comprises both of the CpG dense regions associated with the beta and gamma transcript variants. Accordingly it is particularly preferred according to the present invention that a colorectal cancer diagnostic assay according to the present invention is based on the analysis of at least one CpG positions within SEQ ID NO: 165.

### Tables

TABLE 1
Genomic sequences according to sequence listing

| | | | | Methylated | Methylated | Unmethylated | Unmethylated |
|---|---|---|---|---|---|---|---|
| | | Ensembl | Associated | bisulfite | bisulfite | bisulfite | bisulfite |
| | Ensembl | datanbase* | gene | converted | converted | converted | converted |
| SEQ ID | database* | genomic | transcript | sequence | sequence | sequence | sequence |
| NO: | location | location | (s)* | (sense) | (antisense) | (sense) | (antisense) |
| 1 | AC068594.15.1.168501 | 17 | Septin 9 & | 10 | 11 | 28 | 29 |
| | 150580 | 72789082 | Q9HC74 | | | | |
| | to 151086 (+) to | to | | | | | |
| | AC111170.11.1.158988 | 73008258 | | | | | |
| | 137268 | (+) | | | | | |
| | to 138151 (+) | | | | | | |
| 2 | AC068594.15.1.168501 | 17 | Septin 9 | 12 | 13 | 30 | 31 |
| | 150580 | 72789082 | | | | | |
| | to 151255 (+) | to | | | | | |
| | | 72789757 | | | | | |
| | | (+) | | | | | |
| 3 | AC111182.20.1.171898 | 17 | Q9HC74 | 14 | 15 | 32 | 33 |
| | 127830 | 72881422 | | | | | |
| | to 129168 (+) | to | | | | | |
| | | 72882760 | | | | | |
| | | (+) | | | | | |
| 24 | AC092947.12.1.72207 | 3 | FOXL2 | 30 | 31 | 42 | 43 |
| | 58709 to | 140138862 | | | | | |
| | 60723 (+) | to | | | | | |
| | | 140140876 | | | | | |
| | | (+) | | | | | |
| 25 | AC015656.9.1.147775 | 17 | NGFR | 32 | 33 | 44 | 45 |
| | 12130 to | 44929475 | | | | | |
| | 12961 (+) | to | | | | | |
| | | 44930306 | | | | | |
| | | (−) | | | | | |
| 26 | AC092644.3.1.171099 | 2 | TMEFF2 | 34 | 35 | 46 | 47 |
| | 148656 | 192884909 | | | | | |
| | to 149604 (+) | to | | | | | |
| | | 192885857 | | | | | |
| | | (+) | | | | | |
| 27 | AL049874.3.1.193047 | Chr. 14 | SIX6 | 36 | 37 | 48 | 49 |
| | 183 to | 60045491 | | | | | |
| | 2782 (+) | to | | | | | |
| | | 60048090 | | | | | |
| | | (+) | | | | | |
| 28 | AC002094.1.1.167101 | Chr. 17 | SARM1 & | 38 | 39 | 50 | 51 |
| | 27574 | 23723867 | VTN | | | | |
| | to 28353 (+) | to | | | | | |
| | | 23724646 | | | | | |
| | | (−) | | | | | |
| 29 | AC007375.6.1.180331: | Chr. 14 | ZDHHC22 | 40 | 41 | 52 | 53 |
| | 23232 to | 76676531 | | | | | |
| | 24323 (+) | to | | | | | |
| | | 76677622 | | | | | |
| | | (+) | | | | | |
| 159 | | | Septin 9 | 160 | 161 | 162 | 163 |
| 164 | | | Septin 9 | | | | |
| | | | beta | | | | |
| | | | variant | | | | |
| 165 | AC111182.20.1. | Chr. 17 | Septin 9 | | | | |
| | 171898 126691 | 72880283 | gamma | | | | |
| | to 132252 (+) | to | and beta | | | | |
| | | 72885844 | variants | | | | |
| | | (+) | | | | | |

*Ensembl database v31.35d (8 Jul. 2005)

TABLE 2
Assays according to Example 2

| Genomic | | | | | | |
|---|---|---|---|---|---|---|
| SEQ ID | | | | | | |
| NO: | Assay | Primer | Primer | Blocker | Probe | Probe |
| SEQ ID | HM | Gtagtagtagt | Catccccctac | Caacctaaac | Cgcgggaga | Tgttggcgatc |
| NO: | | agggtagagag | aacctaaa | aacacactccc | gggcgtt | ggcgtttt |
| 26 | | (SEQ ID | (SEQ ID | acacactaaa | (SEQ ID | (SEQ ID |
| (Assay | | NO: 65) | NO: 66) | acac | NO: 68) | NO: 69) |
| 2) | | | | (SEQ ID | | |
| | | | | NO: 67) | | |
| SEQ ID | MSP | Gggtttcgggc | Atatcgcactc | Not | gagggcgacg | ttgggcgtcgtt |
| NO: 27 | | gggta | gctatcgcta | applicable | gtacgttagag | attagttcggtc |
| (Assay | | (SEQ ID | (SEQ ID | | gt | (SEQ ID |
| 1) | | NO: 70) | NO: 71) | | (SEQ ID | NO: 73 |
| | | | | | NO: 72) | |
| SEQ ID | MSP | gtcgggttgga | atatcgcactc | Not | gagggcgacg | ttgggcgtcgtt |
| NO: 27 | | gggacgta | gctatcgcta | applicable | gtacgttagag | attagttcggtc |
| (Assay | | (SEQ ID | (SEQ ID | | gt | (SEQ ID |
| 2) | | NO: 74) | NO: 75) | | (SEQ ID | NO: 77) |
| | | | | | NO: 76) | |
| SEQ ID | HM | gaggtgttaga | tccccctacaa | Acctaaacaa | Cgagtcggcg | agggcgttttgtt |
| NO: 26 | | ggagtagtag | cctaaa | cacactcccac | cggga | ggcgatc |
| (Assay | | (SEQ ID | (SEQ ID | acactaaaac | (SEQ ID | (SEQ ID |
| 2) | | NO: 78) | NO: 79) | accaat | NO: 81) | NO: 82) |
| | | | | (SEQ ID | | |
| | | | | NO: 80) | | |
| SEQ ID | HM | aaaaaaaaa | ggttattgtttgg | Acatacacca | ttttttttttc | tcggtcgatgttt |
| NO: 26 | | aaactcctcta | gttaataaatg | caaataaatta | ggacgtcgtt | tcggtaa |
| (Assay | | catac | (SEQ ID | ccaaaaacat | (SEQ ID | (SEQ ID |
| 6) | | (SEQ ID | NO: 84) | caaccaa | NO: 86) | NO: 87) |
| | | NO: 83) | | (SEQ ID | | |
| | | | | NO: 85) | | |
| SEQ ID | HM | tgagagagag | Tctaaataaca | Ccattaccaac | CgaccCGcc | CGcCGaaa |
| NO: 25 | | agggttgaaa | aaatacctcca | acaacccacc | aacCGac | CGCGctc |
| (Assay | | (SEQ ID | tt | aaccaa | (SEQ ID | (SEQ ID |
| 3) | | NO: 88) | (SEQ ID | (SEQ ID | NO: 91) | NO: 92) |
| | | | NO: 89) | NO: 90) | | |
| SEQ ID | HM | GtAGtAGttA | CCCACCAa | CATCATaT | GaACCCC | Not |
| NO: 1 | (Taq- | GtttAGtAtttA | CCATCATa | CAaACCCC | GCGaTCAA | applicable |
| (Assay | man) | ttTT | T | ACAaTCAA | CGCG | |
| 7) | | (SEQ ID | (SEQ ID | CACACAaC | (SEQ ID | |
| | | NO: 93) | NO: 94) | (SEQ ID | NO: 96) | |
| | | | | NO: 95) | | |
| SEQ ID | HM | GtAGtAGttA | CCCACCAa | CATCATaT | GTtCGAAA | CGTTGAtC |
| NO: 1 | (Light- | GtttAGtAtttA | CCATCATa | CAaACCCC | TGATtttATtt | GCGGGGTt |
| (Assay | cycler) | ttTT | T | ACAaTCAA | AGtTGC | C |
| 7) | | (SEQ ID | (SEQ ID | CACACAaC | (SEQ ID | (SEQ ID |
| | | NO: 97) | NO: 98) | (SEQ ID | NO: 100) | NO: 101) |
| | | | | NO: 99) | | |
| SEQ ID | HM | ccaaaaccta | Ggaaatttgag | Tacaacacca | GTtAATTG | CGtCGttAG |
| NO: 24 | | aacttacaac | gggtaa | ccaacaaacc | CGGGCGAt | CGGGTGG |
| (Assay | | (SEQ ID | (SEQ ID | caaaaacacaA | CGA | G |
| 5) | | NO: 102) | NO: 103) | (SEQ ID | (SEQ ID | (SEQ ID |
| | | | | NO: 104) | NO: 105) | NO: 106) |
| SEQ ID | MSP | aaaatcctctc | cgcgattcgttg | Not | CGgatttCG | Not |
| NO: 1 | | caacacgtc | tttattag | applicable | CGgttaaCG | applicable |
| (Assay | | (SEQ ID | (SEQ ID | | CGtagtt | |
| 2) | | NO: 107) | NO: 108) | | (SEQ ID | |
| | | | | | NO: 109) | |

TABLE 3
Samples analysed according to Example 2

| | Total no | Colorectal | Normal adjacent | |
|---|---|---|---|---|
| Assay | samples | carcinoma | tissue | Blood |
| SEQ ID NO: 24 | 106 | 79 | 0 | 27 |
| (Assay 5) | | | | |
| SEQ ID NO: 25 | 109 | 82 | 0 | 27 |
| (Assay 3) | | | | |
| SEQ ID NO: 26 | 113 | 86 | 0 | 27 |
| (Assay 6) | | | | |
| SEQ ID NO: 1 | 115 | 87 | 0 | 28 |
| (Assay 2) | | | | |
| SEQ ID NO: 26 | 132 | 92 | 16 | 24 |
| (Assay 2) HM | | | | |
| MSP SEQ ID NO: | 128 | 89 | 15 | 24 |
| 27 (Assay 2) | | | | |

TABLE 4
Proportion of colorectal carcinoma samples with
methylation within various threholds

| Assay | above 0.01 | above 0.1 | above 0.3 | above 0.5 |
|---|---|---|---|---|
| SEQ ID NO: 24 | 0.911 | 0.557 | 0.152 | 0.076 |
| (Assay 5) | | | | |
| SEQ ID NO: 25 | 0.573 | 0.402 | 0.232 | 0.073 |
| (Assay 3) | | | | |
| SEQ ID NO: 26 | 0.919 | 0.756 | 0.43 | 0.186 |
| (Assay 6) | | | | |
| SEQ ID NO: 1 | 0.885 | 0.816 | 0.506 | 0.218 |
| (Assay 2) | | | | |
| SEQ ID NO: 26 | 0.924 | 0.739 | 0.446 | 0.228 |
| (Assay 2) HM | | | | |
| MSP SEQ ID NO: 27 | 0.843 | 0.551 | 0.169 | 0.056 |
| (Assay 2) | | | | |

TABLE 5
Proportion of normal adjacent tissue samples
with methylation within various thresholds

| Assay | above 0.001 | above 0.01 | above 0.1 | above 0.3 |
|---|---|---|---|---|
| SEQ ID NO: 26 | 0.938 | 0.938 | 0 | 0 |
| (Assay 2) HM | | | | |
| MSP SEQ ID NO: | 0.933 | 0.533 | 0.067 | 0 |
| 27 (Assay 2) | | | | |

TABLE 6
Proportion of whole blood samples with methylation
within various threholds

| | | | | above |
|---|---|---|---|---|
| Assay | above 0.0001 | above 0.001 | Above 0.01 | 0.1 |
| SEQ ID NO: 24 | 0.074 | 0 | 0 | 0 |
| (Assay 5) | | | | |
| SEQ ID NO: 25 | 0 | 0 | 0 | 0 |
| (Assay 3) | | | | |
| SEQ ID NO: 26 | 0.148 | 0.037 | 0 | 0 |
| (Assay 6) | | | | |
| SEQ ID NO: 1 | 0.071 | 0 | 0 | 0 |
| (Assay 2) | | | | |
| SEQ ID NO: 26 | 0.292 | 0.083 | 0 | 0 |
| (Assay 2) HM | | | | |
| SEQ ID NO: 27 | 0.083 | 0.042 | 0 | 0 |
| (Assay 2 MSP) | | | | |

TABLE 7
Proportion of colorectal carcinoma samples within various
methylation thresholds according to stage of disease

| | Stage I | | Stage II | | Stage III | | Stage IV | |
|---|---|---|---|---|---|---|---|---|
| Assay | >10% | >20% | >10% | >20% | >10% | >20% | >10% | >20% |
| SEQ ID | 38.5 | 23.1 | 90 | 60 | 53.8 | 23.1 | 57.1 | 42.9 |
| NO: 24 | | | | | | | | |
| (Assay 5 HM) | | | | | | | | |
| SEQ ID | 53.8 | 46.2 | 50 | 40 | 44.4 | 37 | 12.5 | 12.5 |
| NO: 25 | | | | | | | | |
| (Assay 3) | | | | | | | | |
| SEQ ID | 64.3 | 64.3 | 90 | 70 | 86.2 | 62.1 | 66.7 | 66.7 |
| NO: 26 | | | | | | | | |
| (Assay 6) | | | | | | | | |
| SEQ ID | 71.4 | 64.3 | 100 | 80 | 79.3 | 58.6 | 88.9 | 88.9 |
| NO: 1 | | | | | | | | |
| (Assay 2 MSP) | | | | | | | | |
| SEQ ID | 66.7 | 66.7 | 92.3 | 76.9 | 75 | 53.6 | 72.7 | 72.7 |
| NO: 26 | | | | | | | | |
| (Assay2) | | | | | | | | |
| SEQ ID | 55.6 | 33.3 | 69.2 | 38.5 | 44.4 | 18.5 | 80 | 50 |
| NO: 27 | | | | | | | | |
| (Assay2) | | | | | | | | |

TABLE 8
Proportion of colorectalcarcinoma samples detected within thresholds 1% to 10%
methylation

| | | | 1% | | 5% | | 10% |
|---|---|---|---|---|---|---|---|
| | N | 1% | methylation | 5% | methylation | 10% | methylation |
| Panel | samples | methylation | gain | methylation | gain | methylation | gain |
| SEQ ID NO: | 78 | 0.987179487 | 0.075787082 | 0.884615385 | 0.045534925 | 0.884615385 | 0.068523431 |
| 24 (Assay | | | | | | | |
| 5)/SEQ ID NO: | | | | | | | |
| 1 (Assay 2) | | | | | | | |
| SEQ ID NO: | 81 | 0.938271605 | 0.053214134 | 0.901234568 | 0.062154108 | 0.888888889 | 0.072796935 |
| 25 (Assay | | | | | | | |
| 3)/SEQ ID NO: | | | | | | | |
| 1 (Assay 2) | | | | | | | |
| SEQ ID NO: | 85 | 0.976470588 | 0.057865937 | 0.894117647 | 0.055037187 | 0.882352941 | 0.066260987 |
| 26 (Assay | | | | | | | |
| 6)/SEQ ID NO: | | | | | | | |
| 1 (Assay 2) | | | | | | | |
| SEQ ID NO: 1 | 79 | 0.974683544 | 0.050770501 | 0.898734177 | 0.059653717 | 0.886075949 | 0.069983995 |
| (Assay 2)/ | | | | | | | |
| SEQ ID NO: | | | | | | | |
| 26(Assay 2 | | | | | | | |
| HM) | | | | | | | |
| SEQ ID NO: 1 | 76 | 0.960526316 | 0.075468845 | 0.921052632 | 0.081972172 | 0.881578947 | 0.065486993 |
| (Assay 2)/MSP | | | | | | | |
| SEQ ID NO: | | | | | | | |
| 27(Assay 2) | | | | | | | |

TABLE 9
Proportion of colorectalcarcinoma samples detected within thresholds 15% to 25%
methylation

| | | | 15% | | 20% | | 25% |
|---|---|---|---|---|---|---|---|
| | N | 15% | methylation | 20% | methylation | 25% | methylation |
| Panel | samples | methylation | gain | methylation | gain | methylation | gain |
| SEQ ID NO: | 78 | 0.820512821 | 0.061892131 | 0.717948718 | 0.039787798 | 0.602564103 | 0.027851459 |
| 24 (Assay | | | | | | | |
| 5)/SEQ ID NO: | | | | | | | |
| 1 (Assay 2) | | | | | | | |
| SEQ ID NO: | 81 | 0.839506173 | 0.080885483 | 0.740740741 | 0.062579821 | 0.62962963 | 0.054916986 |
| 25 (Assay | | | | | | | |
| 3)/SEQ ID NO: | | | | | | | |
| 1 (Assay 2) | | | | | | | |
| SEQ ID NO: | 85 | 0.835294118 | 0.076673428 | 0.776470588 | 0.098309669 | 0.729411765 | 0.154699121 |
| 26 (Assay | | | | | | | |
| 6)/SEQ ID NO: | | | | | | | |
| 1 (Assay 2) | | | | | | | |
| SEQ ID NO: 1 | 79 | 0.835443038 | 0.076822348 | 0.797468354 | 0.119307435 | 0.696202532 | 0.121489888 |
| (Assay 2)/ | | | | | | | |
| SEQ ID NO: | | | | | | | |
| 26(Assay 2 | | | | | | | |
| HM) | | | | | | | |
| SEQ ID NO: 1 | 76 | 0.815789474 | 0.057168784 | 0.684210526 | 0.006049607 | 0.605263158 | 0.030550514 |
| (Assay 2)/MSP | | | | | | | |
| SEQ ID NO: | | | | | | | |
| 27(Assay 2) | | | | | | | |

TABLE 10
Proportion of colorectalcarcinoma samples detected
within thresholds 30% to 50% methylation

| | | 30% | 30% methylation | 50% |
|---|---|---|---|---|
| Panel | N samples | methylation | gain | methylation |
| SEQ ID NO: 24 (Assay | 78 | 0.538461538 | 0.032714412 | 0.269230769 |
| 5)/SEQ ID NO: 1 (Assay 2) | | | | |
| SEQ ID NO: 25 (Assay | 81 | 0.580246914 | 0.074499787 | 0.259259259 |
| 3)/SEQ ID NO: 1 (Assay 2) | | | | |
| SEQ ID NO: 26 (Assay | 85 | 0.635294118 | 0.129546991 | 0.305882353 |
| 6)/SEQ ID NO: 1 (Assay 2) | | | | |
| SEQ ID NO: 1 (Assay 2)/ | 79 | 0.620253165 | 0.114506038 | 0.303797468 |
| SEQ ID NO: 26 (Assay 2 | | | | |
| HM) | | | | |
| SEQ ID NO: 1 (Assay | 76 | 0.539473684 | 0.033726558 | 0.263157895 |
| 2)/MSP SEQ ID NO: | | | | |
| 27(Assay 2) | | | | |

TABLE 11
Proportion of whole blood samples detected within
thresholds 0.01% to 0.1% methylation

| | N | 0.01% | 0.1% |
|---|---|---|---|
| Panel | samples | methylation | methylation |
| SEQ ID NO: 24 (Assay 5)/SEQ ID | 27 | 0.111111111 | 0 |
| NO: 1 (Assay 2) | | | |
| SEQ ID NO: 25 (Assay 3)/SEQ ID | 27 | 0.074074074 | 0 |
| NO: 1 (Assay 2) | | | |
| SEQ ID NO: 26 (Assay 6)/SEQ ID | 27 | 0.185185185 | 0.037037037 |
| NO: 1 (Assay 2) | | | |
| SEQ ID NO: 1 (Assay 2)/SEQ ID | 22 | 0.272727273 | 0.090909091 |
| NO: 26 (Assay 2 HM) | | | |
| SEQ ID NO: 1 (Assay 2)/MSP | 22 | 0.136363636 | 0.045454545 |
| SEQ ID NO: 27 (Assay 2) | | | |

TABLE 12
Differentiation between blood and colorectal
carcinoma sample as illustrated in FIG. 2.*

| | | AUC of | | Wilcoxon |
|---|---|---|---|---|
| FIG. | Assay | ROC | Sensitivity/Specificity | P-value |
| 2 | SEQ ID NO: 1 | 0.99 (0.95/1) | 0.98/0.93 | 0 |
| | (Assay 2) | | | |

*confidence intervals are shown in brackets

TABLE 13
Sample set 1 according to Example 3.

| Sample | | | | | | | |
|---|---|---|---|---|---|---|---|
| Type | Sex | Age | Stage | T | N | M | Location |
| CRC | F | 39 | III | 4 | 1 | 0 | sigmoid |
| CRC | F | 65 | III | 3 | 2 | 0 | ileo-cecum |
| CRC | M | 58 | IV | | | | rectum |
| CRC | M | 63 | III | 3 | 1 | 0 | rectum |
| CRC | M | 71 | II | | | | ascending |
| CRC | F | 69 | I | 2 | 0 | 0 | cecum |
| CRC | F | 54 | III | 3 | 2 | 0 | cecum |
| CRC | M | 44 | IV | | | | |
| CRC | F | 75 | IV | | | | transverse |
| CRC | F | 60 | II | | | | rectum |
| CRC | M | 76 | I | | | | descending |
| CRC | M | 69 | IV | | | | sigmoid |
| CRC | M | 73 | I | 1 | 0 | 0 | rectum |
| CRC | M | | II | 3 | 0 | 0 | ascending |
| CRC | M | 62 | III | 3 | 1 | | |
| CRC | F | 49 | IV | | | | ascending |
| CRC | F | 58 | III | 3 | 1 | X | ascending |
| CRC | M | 42 | IV | 3 | 0 | 1 | |
| CRC | M | 64 | I | 2 | 0 | 0 | sigmoid |
| CRC | F | 64 | III | | | | rectum |
| CRC | F | 70 | III | 3 | 1 | 0 | terminal ileum |
| CRC | M | 67 | | | | | |
| CRC | M | 80 | III | 3 | 1 | 0 | rectosigmoid |
| CRC | F | 72 | IV | | | | sigmoid |
| CRC | M | | III | | | | rectum |
| CRC | M | 56 | I | 2 | 0 | 0 | sigmoid |
| CRC | M | 72 | III | 2 | 1 | 0 | rectum |
| CRC | M | 45 | IV | 4 | 2 | 1 | cecum |
| CRC | F | | II | 3 | 0 | 0 | |
| CRC | M | 74 | III | 3 | 1 | 0 | rectosigmoid |
| CRC | F | 75 | III | 4 | 2 | 0 | cecum wall |
| CRC | M | | III | 3 | 1 | 0 | |
| CRC | M | | I | 2 | 0 | 0 | ascending |
| CRC | F | 74 | I | 2 | 0 | 0 | cecum |
| CRC | M | 62 | I | 2 | 0 | 0 | rectosigmoid |
| CRC | F | 60 | II | 3 | 0 | 0 | rectum |
| CRC | F | 80 | II | | | | ascending |
| CRC | F | 70 | III | 4 | 2 | 0 | rectum |
| CRC | M | | III | 3 | 1 | 0 | |
| CRC | F | 75 | III | 3 | 1 | 0 | ascending |
| CRC | F | 49 | IV | 4 | X | 1 | rectum |
| CRC | F | 47 | I | | | | anus |
| CRC | M | 81 | IV | | | 1 | |
| CRC | F | 89 | III | 3 | 1 | 0 | rectum |
| CRC | M | 85 | III | 3 | 1 | 0 | cecum |
| CRC | M | 52 | III | 2 | 1 | 0 | |
| CRC | M | 75 | II | | | | sigmoid |
| CRC | M | | | | | | |
| CRC | F | 71 | | | | | |
| CRC | M | | III | | | | rectum |
| CRC | M | 61 | | 3 | x | 0 | descending |
| CRC | F | 56 | unk | | | | sigmoid |
| CRC | F | 68 | IV | 3 | 2 | 1 | sigmoid |
| CRC | F | 65 | III | 3 | 2 | 0 | ileo-cecum |
| CRC | M | 88 | II | 3 | 0 | 0 | flexure |
| CRC | F | 72 | III | | | | cecum |
| CRC | M | 61 | IV | 3 | 2 | 1 | rectum |
| CRC | M | | III | 3 | 2 | | |
| CRC | M | 52 | II | 3 | 0 | 0 | transverse |
| CRC | M | 66 | IV | 2 | 0 | 1 | rectum |
| CRC | M | 64 | III | | | | ascending |
| CRC | F | 65 | II | 3 | 0 | 0 | |
| CRC | M | 61 | IV | 3 | 2 | 1 | sigmoid |
| CRC | M | 64 | III | 3 | 1 | 0 | ascending |
| CRC | M | 76 | 0 | 0 | | | sigmoid |
| CRC | M | 64 | I | 2 | 0 | 0 | ascending |
| CRC | M | 56 | I | 2 | 0 | 0 | transverse |
| CRC | F | 67 | II | 3 | 0 | 0 | sigmoid |
| CRC | M | | II | 3 | 0 | 0 | ascending |
| CRC | M | 66 | III | 4 | 1 | 0 | |
| CRC | M | | II | 3 | 0 | 0 | |
| CRC | F | | III | | | | |
| CRC | F | 65 | I | 2 | 0 | X | rectum |
| CRC | M | | II | 3 | 0 | 0 | |
| CRC | M | 40 | I | | | | FAP |
| CRC | M | 77 | I | 2 | 0 | 0 | rectosigmoid |
| CRC | M | 65 | III | 4 | 2 | 0 | descending |
| CRC | M | 68 | IV | | | | sigmoid |
| CRC | M | 67 | II | | | | rectum |
| CRC | M | | unk | | | | rectum |
| CRC | F | 63 | | 3 | x | 0 | |
| CRC | M | 68 | unk | | | | descending |
| CRC | F | 53 | III | 3 | 1 | 0 | ascending |
| CRC | M | | II | 3 | 0 | 0 | |
| CRC | M | 68 | I | 2 | 0 | 0 | rectum |
| CRC | M | 84 | III | | | | rectum |
| CRC | F | 53 | I | 1 | 0 | 0 | descending |
| CRC | M | 72 | III | 4 | 1 | 0 | |
| CRC | F | 69 | I | 1 | 0 | 0 | sigmoid |
| CRC | M | | II | 3 | 0 | 0 | descending |
| CRC | M | | II | 3 | 0 | 0 | cecum |
| Normal | F | 62 | n.a. | n.a. | n.a. | n.a. | n.a. |
| Blood | | | | | | | |
| Normal | M | 62 | n.a. | n.a. | n.a. | n.a. | n.a. |
| Blood | | | | | | | |
| Normal | F | 44 | n.a. | n.a. | n.a. | n.a. | n.a. |
| Blood | | | | | | | |
| Normal | F | 57 | n.a. | n.a. | n.a. | n.a. | n.a. |
| Blood | | | | | | | |
| Normal | F | 51 | n.a. | n.a. | n.a. | n.a. | n.a. |
| Blood | | | | | | | |
| Normal | M | 66 | n.a. | n.a. | n.a. | n.a. | n.a. |
| Blood | | | | | | | |
| Normal | M | 65 | n.a. | n.a. | n.a. | n.a. | n.a. |
| Blood | | | | | | | |
| Normal | M | 55 | n.a. | n.a. | n.a. | n.a. | n.a. |
| Blood | | | | | | | |
| Normal | F | 70 | n.a. | n.a. | n.a. | n.a. | n.a. |
| Blood | | | | | | | |
| Normal | M | 40 | n.a. | n.a. | n.a. | n.a. | n.a. |
| Blood | | | | | | | |
| Normal | F | 42 | n.a. | n.a. | n.a. | n.a. | n.a. |
| Blood | | | | | | | |
| Normal | F | 68 | n.a. | n.a. | n.a. | n.a. | n.a. |
| Blood | | | | | | | |
| Normal | F | 67 | n.a. | n.a. | n.a. | n.a. | n.a. |
| Blood | | | | | | | |
| Normal | F | 53 | n.a. | n.a. | n.a. | n.a. | n.a. |
| Blood | | | | | | | |
| Normal | F | | n.a. | n.a. | n.a. | n.a. | n.a. |
| Blood | | | | | | | |
| Normal | F | 50 | n.a. | n.a. | n.a. | n.a. | n.a. |
| Blood | | | | | | | |
| Normal | M | 50 | n.a. | n.a. | n.a. | n.a. | n.a. |
| Blood | | | | | | | |
| Normal | M | 51 | n.a. | n.a. | n.a. | n.a. | n.a. |
| Blood | | | | | | | |
| Normal | M | 56 | n.a. | n.a. | n.a. | n.a. | n.a. |
| Blood | | | | | | | |
| Normal | M | 58 | n.a. | n.a. | n.a. | n.a. | n.a. |
| Blood | | | | | | | |
| Normal | M | 67 | n.a. | n.a. | n.a. | n.a. | n.a. |
| Blood | | | | | | | |
| Normal | M | 55 | n.a. | n.a. | n.a. | n.a. | n.a. |
| Blood | | | | | | | |
| Normal | M | 62 | n.a. | n.a. | n.a. | n.a. | n.a. |
| Blood | | | | | | | |
| Normal | M | 66 | n.a. | n.a. | n.a. | n.a. | n.a. |
| Blood | | | | | | | |
| Normal | F | 56 | n.a. | n.a. | n.a. | n.a. | n.a. |
| Blood | | | | | | | |
| Normal | M | 56 | n.a. | n.a. | n.a. | n.a. | n.a. |
| Blood | | | | | | | |
| Normal | F | 69 | n.a. | n.a. | n.a. | n.a. | n.a. |
| Blood | | | | | | | |

TABLE 14
Sample set 2 according to Example 3.

| Sample Type | Sex | Age | Stage | T | N | M | Location |
|---|---|---|---|---|---|---|---|
| CRC | F | 49 | IV | | | | ascending |
| CRC | F | 72 | IV | | | | sigmoid |
| CRC | M | 69 | IV | | | | sigmoid |
| CRC | F | 58 | III | 3 | 1 | X | ascending |
| CRC | F | 60 | II | | | | rectum |
| CRC | F | 74 | I | 2 | 0 | 0 | cecum |
| CRC | F | 70 | III | 3 | 1 | 0 | terminal |
| | | | | | | | ileum |
| CRC | F | 69 | I | 2 | 0 | 0 | cecum |
| CRC | F | 39 | III | 4 | 1 | 0 | sigmoid |
| CRC | M | 56 | I | 2 | 0 | 0 | sigmoid |
| CRC | F | | II | 3 | 0 | 0 | |
| CRC | M | 64 | I | 2 | 0 | 0 | sigmoid |
| CRC | M | 45 | IV | 4 | 2 | 1 | cecum |
| CRC | F | 54 | III | 3 | 2 | 0 | cecum |
| CRC | M | 42 | IV | 3 | 0 | 1 | |
| CRC | M | 73 | I | 1 | 0 | 0 | rectum |
| CRC | M | 62 | III | 3 | 1 | | |
| CRC | M | | I | 2 | 0 | 0 | ascending |
| CRC | F | 75 | III | 3 | 1 | 0 | ascending |
| CRC | M | 74 | III | 3 | 1 | 0 | rectosigmoid |
| CRC | F | 68 | IV | 3 | 2 | 1 | sigmoid |
| CRC | F | 75 | IV | | | | transverse |
| CRC | M | 85 | III | 3 | 1 | 0 | cecum |
| CRC | M | 80 | III | 3 | 1 | 0 | rectosigmoid |
| CRC | M | 66 | III | 4 | 1 | 0 | |
| CRC | F | 70 | III | 4 | 2 | 0 | rectum |
| CRC | F | 89 | III | 3 | 1 | 0 | rectum |
| CRC | M | 67 | | | | | |
| CRC | F | 67 | II | 3 | 0 | 0 | sigmoid |
| CRC | M | 66 | IV | 2 | 0 | 1 | rectum |
| CRC | F | 56 | unk | | | | sigmoid |
| CRC | M | 72 | III | 2 | 1 | 0 | rectum |
| CRC | F | 80 | II | | | | ascending |
| CRC | M | 75 | II | | | | sigmoid |
| CRC | F | 49 | IV | 4 | X | 1 | rectum |
| CRC | M | | III | | | | rectum |
| CRC | F | 60 | II | 3 | 0 | 0 | rectum |
| CRC | M | 62 | I | 2 | 0 | 0 | rectosigmoid |
| CRC | M | 88 | II | 3 | 0 | 0 | flexure |
| CRC | M | 61 | IV | 3 | 2 | 1 | sigmoid |
| CRC | M | 61 | | 3 | x | 0 | descending |
| CRC | F | 64 | III | | | | rectum |
| CRC | M | | III | | | | rectum |
| CRC | M | 52 | II | 3 | 0 | 0 | transverse |
| CRC | F | 71 | | | | | |
| CRC | M | 81 | IV | | | 1 | |
| CRC | F | 65 | III | 3 | 2 | 0 | ileo-cecum |
| CRC | M | | | | | | |
| CRC | F | 65 | II | 3 | 0 | 0 | |
| CRC | F | 72 | III | | | | cecum |
| CRC | M | 61 | IV | 3 | 2 | 1 | rectum |
| CRC | M | 52 | III | 2 | 1 | 0 | |
| CRC | M | | II | 3 | 0 | 0 | |
| CRC | F | 47 | I | | | | anus |
| CRC | M | | II | 3 | 0 | 0 | ascending |
| CRC | M | 64 | III | 3 | 1 | 0 | ascending |
| CRC | M | 64 | I | 2 | 0 | 0 | ascending |
| CRC | M | 76 | 0 | 0 | | | sigmoid |
| CRC | M | 56 | I | 2 | 0 | 0 | transverse |
| CRC | M | 65 | III | 4 | 2 | 0 | descending |
| CRC | M | 40 | I | | | | FAP |
| CRC | F | 53 | I | 1 | 0 | 0 | descending |
| CRC | M | | II | 3 | 0 | 0 | |
| CRC | M | | III | 3 | 2 | | |
| CRC | M | | unk | | | | rectum |
| CRC | M | 68 | I | 2 | 0 | 0 | rectum |
| CRC | F | 63 | | 3 | x | 0 | |
| CRC | F | | III | | | | |
| CRC | M | 67 | II | | | | rectum |
| CRC | F | 65 | I | 2 | 0 | X | rectum |
| CRC | M | 64 | III | | | | ascending |
| CRC | M | 68 | IV | | | | sigmoid |
| CRC | M | | II | 3 | 0 | 0 | |
| CRC | M | 72 | III | 4 | 1 | 0 | |
| CRC | M | 77 | I | 2 | 0 | 0 | rectosigmoid |
| CRC | F | 53 | III | 3 | 1 | 0 | ascending |
| CRC | F | 69 | I | 1 | 0 | 0 | sigmoid |
| CRC | M | 84 | III | | | | rectum |
| CRC | M | | II | 3 | 0 | 0 | descending |
| CRC | M | 68 | unk | | | | descending |
| CRC | M | | II | 3 | 0 | 0 | cecum |
| Normal Blood | M | 55 | n.a. | n.a. | n.a. | n.a. | n.a. |
| Normal Blood | M | 62 | n.a. | n.a. | n.a. | n.a. | n.a. |
| Normal Blood | F | 57 | n.a. | n.a. | n.a. | n.a. | n.a. |
| Normal Blood | F | 62 | n.a. | n.a. | n.a. | n.a. | n.a. |
| Normal Blood | M | 65 | n.a. | n.a. | n.a. | n.a. | n.a. |
| Normal Blood | F | | n.a. | n.a. | n.a. | n.a. | n.a. |
| Normal Blood | F | 44 | n.a. | n.a. | n.a. | n.a. | n.a. |
| Normal Blood | F | 68 | n.a. | n.a. | n.a. | n.a. | n.a. |
| Normal Blood | F | 70 | n.a. | n.a. | n.a. | n.a. | n.a. |
| Normal Blood | M | 58 | n.a. | n.a. | n.a. | n.a. | n.a. |
| Normal Blood | M | 62 | n.a. | n.a. | n.a. | n.a. | n.a. |
| Normal Blood | F | 53 | n.a. | n.a. | n.a. | n.a. | n.a. |
| Normal Blood | F | 42 | n.a. | n.a. | n.a. | n.a. | n.a. |
| Normal Blood | F | 51 | n.a. | n.a. | n.a. | n.a. | n.a. |
| Normal Blood | M | 66 | n.a. | n.a. | n.a. | n.a. | n.a. |
| Normal Blood | M | 51 | n.a. | n.a. | n.a. | n.a. | n.a. |
| Normal Blood | M | 40 | n.a. | n.a. | n.a. | n.a. | n.a. |
| Normal Blood | M | 56 | n.a. | n.a. | n.a. | n.a. | n.a. |
| Normal Blood | F | 56 | n.a. | n.a. | n.a. | n.a. | n.a. |
| Normal Blood | F | 50 | n.a. | n.a. | n.a. | n.a. | n.a. |
| Normal Blood | M | 50 | n.a. | n.a. | n.a. | n.a. | n.a. |
| Normal Blood | F | 67 | n.a. | n.a. | n.a. | n.a. | n.a. |
| Normal Blood | M | 67 | n.a. | n.a. | n.a. | n.a. | n.a. |
| Normal Blood | M | 55 | n.a. | n.a. | n.a. | n.a. | n.a. |
| Normal Blood | M | 66 | n.a. | n.a. | n.a. | n.a. | n.a. |
| Normal Blood | M | 56 | n.a. | n.a. | n.a. | n.a. | n.a. |

TABLE 15
Proportion samples from sample set 1 according to Example 3 with methylation
within various thresholds.

| | CRC | CRC | CRC | Blood | Blood | Blood |
|---|---|---|---|---|---|---|
| Assays | >10%** | >20%** | >30%** | 2 of 2+* | 1 of 2+** | >1% |
| SEQ ID NO: 1 (Assay 2) | 75 | 62 | 46 | 1 | 1 | 0 |
| % | 82,41758 | 68,13187 | 50,54945 | 3,703704 | 3,703704 | 0 |
| SEQ ID NO: 6 (Assay 6)/SEQ ID NO: | 79 | 69 | 59 | 2 | 11 | 5 |
| 1.2 | | | | | | |
| % | 86,81319 | 75,82418 | 64,83516 | 7,407407 | 40,74074 | 18,51852 |
| SEQ ID NO: 1 (Assay 2)/SEQ ID NO: | 78 | 62 | 45 | 1 | 1 | 0 |
| 4 (Assay 5)/SEQ ID NO: 15174 | | | | | | |
| (Assay 3) | | | | | | |
| % | 85,71429 | 68,13187 | 49,45055 | 3,703704 | 3,703704 | 0 |
| SEQ ID NO: 1 (Assay 2)/SEQ ID NO: | 77 | 66 | 51 | 1 | 1 | 0 |
| 5 (Assay 3) | | | | | | |
| % | 84,61538 | 72,52747 | 56,04396 | 3,703704 | 3,703704 | 0 |
| SEQ ID NO: 6 (Assay 6)/SEQ ID NO: | 79 | 69 | 58 | 2 | 11 | 5 |
| 1 (Assay 2)/SEQ ID NO: 4 (Assay 5) | | | | | | |
| % | 86,81319 | 75,82418 | 63,73626 | 7,407407 | 40,74074 | 18,51852 |
| SEQ ID NO: 1 (Assay 2)/SEQ ID NO: | 78 | 66 | 51 | 1 | 1 | 0 |
| 4 (Assay 5)/SEQ ID NO: 15174 | | | | | | |
| (Assay 3) | | | | | | |
| % | 85,71429 | 72,52747 | 56,04396 | 3,703704 | 3,703704 | 0 |
| SEQ ID NO: 1 (Assay 2)/SEQ ID NO: | 79 | 69 | 59 | 2 | 11 | 0 |
| 6 (Assay 6)/SEQ ID NO: 15174 | | | | | | |
| (Assay 3) | | | | | | |
| % | 86,81319 | 75,82418 | 64,83516 | 7,407407 | 40,74074 | 0 |

*Both replicates tested positive
**One of two replicates tested positive or measured within threshold

TABLE 16
Proportion samples from sample set 2 according to Example 3 with methylation
within various thresholds.

| | CRC | CRC | CRC | Blood | Blood | NAT | NAT | NAT |
|---|---|---|---|---|---|---|---|---|
| | >10%* | >20%* | >30%* | Positive* | >1%* | <5%* | 5-10%* | >10%* |
| SEQ ID NO: 1 (Assay | 66 | 54 | 37 | 2 | 1 | 15 | 6 | 1 |
| 7) LC | | | | | | | | |
| % | 81,48148 | 66,66667 | 45,67901 | 7,692308 | 3,846154 | 68,18182 | 27,27273 | 4,545455 |
| SEQ ID NO: 1 (Assay 7)- | 69 | 57 | 42 | 3 | 2 | | | |
| LC/SEQ ID NO: 28 | | | | | | | | |
| (Assay 2) | | | | | | | | |
| % | 85,18519 | 70,37037 | 51,85185 | 11,53846 | 7,692308 | | | |
| SEQ ID NO: 1 (Assay 7)- | 68 | 55 | 39 | 2 | 1 | | | |
| LC/SEQ ID NO: 24 | | | | | | | | |
| (Assay 5b) | | | | | | | | |
| % | 83,95062 | 67,90123 | 48,14815 | 7,692308 | 3,846154 | | | |
| SEQ ID NO: 1 (Assay 7)- | 68 | 58 | 46 | 6 | 5 | | | |
| Taqman | | | | | | | | |
| % | 83,95062 | 71,60494 | 56,79012 | 23,07692 | 19,23077 | | | |

*One of two replicates tested positive or measured within threshold

TABLE 17
Assays according to Example 3

| Genomic | | | | | | |
|---|---|---|---|---|---|---|
| SEQ ID | | | | | | |
| NO: | Assay | Primer | Primer | Blocker | Probe | Probe |
| SEQ ID | HM | ccaaaaccta | tctaaataaca | Tacaacacca | GTtAATTG | CGtCGttAG |
| NO: 24 | | aacttacaac | aaatacctcca | caaaaacaca | CGGGCGAt | CGGGTGG |
| (Assay | | (SEQ ID | tt | a | CGA | G |
| 5) | | NO: 102) | (SEQ ID | (SEQ ID | (SEQ ID | (SEQ ID |
| | | | NO: 110) | NO: 104) | NO: 105) | NO:106) |
| SEQ ID | HM | GttTttTttAtt | aAaCTaCA | CCTTaTCC | CGtttACGG | CGttCGttTG |
| NO: 28 | | AGTTGGA | aCAaaCCT | ACACTaAA | ttCGCGCG | tTTtAGCGC |
| (Assay | | AGAttT | TaTC | aCAaaCAa | (SEQ ID | G |
| 2 | | (SEQ ID | (SEQ ID | aCAaCACA | NO: 114) | (SEQ ID |
| | | NO: 111) | NO: 112) | CAaaC | | NO: 115) |
| | | | | (SEQ ID | | |
| | | | | NO: 113) | | |
| SEQ ID | HM | ggtgttgtttattt | CTCCCCTA | CTaTCCTT | ttaggggggC | gttagatgCGt |
| NO: 29 | | tagagagtt | aCCCCTaT | CACCACC | GCGgga | CGtagCGttg |
| (Assay | | (SEQ ID | C | TTCCCAaC | (SEQ ID | (SEQ ID |
| 2b) | | NO: 116) | (SEQ ID | ACTaCA | NO: 119) | NO: 120) |
| | | | NO: 117) | (SEQ ID | | |
| | | | | NO: 118) | | |

TABLE 18
Proportion samples from sample set 3 according to Example 3 with methylation
within various thresholds.

| | CRC | CRC | CRC | blood | blood | blood | BC | BC | BC |
|---|---|---|---|---|---|---|---|---|---|
| | >10% | >20% | >30% | >0.1 | >1 | >10 | >10% | >20% | >30% |
| SEQ ID NO: 1 | 6 | 5 | 5 | 0 | 0 | 0 | 4 | 2 | 2 |
| (Assay 2) | | | | | | | | | |
| % | 50 | 41,66667 | 41,66667 | 0 | 0 | 0 | 28,57143 | 14,28571 | 14,28571 |

TABLE 19
Sample set 3 according to Example 3.

| Sample | Year of | | | |
|---|---|---|---|---|
| Type | birth | Sex | Race | Diagnosis |
| CRC | 1938 | F | Asian | M0, N0, T3, adenocarcinoma, |
| | | | | stage II, well |
| | | | | differentiated |
| CRC | 1941 | F | Asian | M0, N1, T3, adenocarcinoma, |
| | | | | moderately |
| | | | | differentiated, stage |
| | | | | III, sigmoid |
| CRC | 1956 | F | Asian | M0, N1, T2, adenocarcinoma, |
| | | | | stage III, well |
| | | | | differentiated |
| CRC | 1945 | F | Asian | M0, T2, adenocarcinoma, |
| | | | | grade 2, N0 |
| CRC | 1961 | F | Asian | M0, N1, T3, adenocarcinoma, |
| | | | | stage III, well |
| | | | | differentiated, sigmoid |
| CRC | 1945 | F | unknown | M0, N0, T2, adenocarcinoma, |
| | | | | stage I, well |
| | | | | differentiated, descending |
| CRC | 1970 | F | Asian | M0, N0, T3, adenocarcinoma, |
| | | | | moderately |
| | | | | differentiated, stage |
| | | | | II, ascending |
| CRC | 1941 | F | Asian | M0, N0, T3, adenocarcinoma, |
| | | | | moderately |
| | | | | differentiated, stage |
| | | | | II, sigmoid |
| CRC | 1952 | F | White | M1, T3, ulcerative, low |
| | | | | grade, cancer, sigmoid, |
| | | | | stromal |
| CRC | 1948 | F | Asian | M0, N1, T3, adenocarcinoma, |
| | | | | stage |
| | | | | III, ascending, grade 1 |
| CRC | 1947 | F | Asian | M0, N0, T3, adenocarcinoma, |
| | | | | stage II, well |
| | | | | differentiated, grade 1 |
| CRC | 1955 | F | Asian | M0, N0, T3, adenocarcinoma, |
| | | | | stage II, well |
| | | | | differentiated, grade |
| | | | | 1, rectum |

| Sample | | |
|---|---|---|
| Type | Age | Sex |
| Blood | 16 | F |
| Blood | 33 | F |
| Blood | 33 | F |
| Blood | 35 | F |
| Blood | 23 | F |
| Blood | 35 | F |
| Blood | 19 | F |
| Blood | 36 | F |
| Blood | 24 | F |
| Blood | 37 | F |

| | | | Menopausal | |
|---|---|---|---|---|
| Sample | | | StageAtTime | BC |
| Type | Age | Sex | OfDiagnosis | StageNStageValue |
| Breast | 63 | F | postmenopausal | N1 |
| Cancer | | | | |
| Breast | 59 | F | postmenopausal | N0 |
| Cancer | | | | |
| Breast | 56 | F | postmenopausal | N0 |
| Cancer | | | | |
| Breast | 45 | F | premenopausal | N2 |
| Cancer | | | | |
| Breast | 85 | F | postmenopausal | N0 |
| Cancer | | | | |
| Breast | 65 | F | postmenopausal | N0 |
| Cancer | | | | |
| Breast | 32 | F | premenopausal | N2 |
| Cancer | | | | |
| Breast | 47 | F | premenopausal | N1 |
| Cancer | | | | |
| Breast | 44 | F | premenopausal | N0 |
| Cancer | | | | |
| Breast | 29 | F | premenopausal | N1 |
| Cancer | | | | |
| Breast | 37 | F | premenopausal | N0 |
| Cancer | | | | |
| Breast | 44 | F | premenopausal | N0 |
| Cancer | | | | |
| Breast | 52 | F | postmenopausal | N0 |
| Cancer | | | | |
| Breast | 54 | F | premenopausal | N0 |
| Cancer | | | | |

TABLE 20
Results of Example 4

| | | |
|---|---|---|
| Disease type | total + samples | total sample # |

Other cancers

| | | |
|---|---|---|
| Bladder | 4 | 10 |
| Breast | 5 | 29 |
| Liver | 7 | 9 |
| Lung | 10 | 26 |
| Prostate | 5 | 29 |
| Stomach | 2 | 7 |
| Pancreas | 1 | 8 |

Other diseases

| | | |
|---|---|---|
| appendicitis | 1 | 6 |
| cholecystitis | 3 | 10 |
| IBD | 4 | 17 |
| diabetes | 3 | 10 |
| esophagitis | 2 | 10 |
| gastritis | 3 | 11 |
| chronic heart disease | 5 | 10 |
| pancreatitis | 3 | 10 |
| pyelonephritis | 5 | 10 |
| respiratory tract infection | 3 | 10 |
| severe allergy | 4 | 11 |
| diverticulosis/diverticulitis | 0 | 5 |
| rheumatoid arthritis | 0 | 9 |
| chronic renal disease | 0 | 9 |
| non-rheumatoid arthritis | 0 | 10 |

TABLE 21
Primers and genomic equivalents of amplificates according to Example 5.

| | | | Genomic | | | | |
|---|---|---|---|---|---|---|---|
| | | Amplicon | Ampicon | | Primer | | Primer |
| Amplicon | Amplicon | name in | equivalent | | 1 SEQ | | 2 SEQ |
| name | size | figures | SEQ ID NO: | PCR primer 1 | ID NO: | PCR primer 2 | ID NO: |
| gamma-rc1 | 493 | 1 | 129 | gamma-rc1F | 130 | gamma-rc1R | 131 |
| gamma-rc2 | 428 | 2 | 132 | gamma-rc2F | 133 | gamma-rc2R | 134 |
| gamma-3-2 | 557 | 3 | 135 | gamma-3F_2 | 136 | gamma-3R | 137 |
| gamma-4 | 556 | 4 | 138 | gamma-4F | 139 | gamma-4R | 140 |
| epsilon-1 | 529 | 5 | 141 | epsilon-1F | 142 | epsilon-1R | 143 |
| epsilon-rc2 | 550 | 6 | 144 | epsilon-rc2F | 145 | epsilon-rc2R | 146 |
| epsilon-rc3 | 423 | 7 | 147 | epsilon-rc3F | 148 | epsilon-rc3R | 149 |
| beta-rc1 | 282 | 8 | 150 | beta-rc1F | 151 | beta-rc1R | 152 |
| alpha-1 | 459 | 9 | 153 | alpha-1F | 154 | alpha-1R | 155 |
| alpha | 260 | 10 | 156 | alpha-F | 157 | alpha-R | 158 |

Note:
Amplicons with “rc” in their names were amplified from the Bis2 strand, others from the Bis1 strand.

The application's sequence listing, which the Patent Office published only in electronic form, follows.

SEQUENCE LISTING (173 sequences)

SEQ ID NO: 1 - DNA, 219909 bp, Homo Sapiens
cgttacccgagttgtaaagggcggctccctgtgtctgccccgctgcaccgatacaccgagctgcgcacggtgcccagcgcagggagaacaaatgatcatctgtccaacgcgcccatttacaggtgaggaaactaaggctccaactcaatcgacgcactctgcccttttgattaccagaaaagtagcaggacaggtgtcctgtcccgccctaccccggcccactaagccggcaccccggctccgacccccggctgtgcccggcgccgccgcggtgcccggcgccgccgcctcgcccggcggggccgcccggagcgcccgcacctccgcccgcttccacctggccgggcccgccccgcccggactcgggactgggaagtgcggcgactcccggaaccagccattggcgccagcgcggggagctgggggtgcagagctgcgggcgcggcgggccacgcaggcggcccccacccccggcctggcctggtctggtctggtctgcgctgccgcgcgggggcgccccctcccaggcccggcgcccgccagccccgctccgccaggtgcagcgcagcgcaggggtgggcgggggtggggctcggcgcgcacgttcacggggcggggagggggcgggtcaggggcgggaccacagccggctgggccggggttctatgcgcatctccggggaggggcggggcgggggcggggccggggcggggcccggtcggtgcactccagacggcgggccgccccctcttcccgccttcctactaccggcccaggattagcgccctgggagcgcgcgccccgctgcctcgccgccacactttcctgggagcggcggccacggaggcaccatgaagaagtcttactcaggtgggcttcgcgcccggggtggggaggggtcggtgtcccgggaccagcgctgctcacctgagtgcctgcggccgggagtggcgaggcgcccccggagctgagcgagtccccgcggcgggcacactgcaggtcgagttcctcccaggacagggccgctgtcgggccgctttcgacctgagccgaccgtcccctgcgctgtctccagcccttgctcgagtgtcggaggggctgccctgggggacgctccctcttcctcgccccttgcaccctcgcaggaatcgctgactttccaggtcggccgggtgctttgggtccctgtgcgtctgtgtgggtgaatggggtcggggctaggtggaggggtgtccttgggttcagcctctagggctggtggtccaggccgcagcatcctttcttcggattctcttcggtttctcctctacttagtggggcacgggacggcctccagatgggaccgtccagcagcgcccaaacttggcgactcgggttcacgttttgcgctcaggacgccgcccgcggctgacatcctcactccaccctagcagggcccgccttaagtaggcgaagggggcctgacttgggcctcaccatgagccggttcaggagctttcatttcataagaggctcccgctctggcactctgaagttccatttcacagatgggcacaccgaggccacaagggcaggttaagagaaatccagatcttcattatttgtcttttccttccttttttttttcctttgtggttttctccaaaggatccaggcaggcaggatcctttgtcctcctcagtcctcaaattataaatagcgtctcctcttctaaatctagaaaccgtttgtttaatgtccctcctttaattcattcagatagaaaggtacctgccaaggatccatgaattaatttttattgataggagaacagaatcatgggccttagttggaggtgaaggagtcatcggggccatccccctgcctttgggccattgtcggtttcctctggctttccatatttaggaaccaaaatgagtgataaagtaccttgtctcaaagaggattactcagaacttccccgaaaatacccttctgggtcagtagcttagaatttcaactttcacccggttgttgcgaacaagatggccctctacgcacccggagcacagctctgtcaggagcgtgggtgggttggtgtgctggtgggcgggagcgggcttccaggtggcacatgcttggttttggcaccggggcttcctccccaacatgctccaaatacttgagattgttgtggggatcgcgcggtgcatggccctttccaggggatctctagcccgcccagggagggccctttgcccttggtttcttacactttacctcccactggtgggtccagacagtgggggtgaccggggtcctcccaggtcgtgggtcctgggttttttctgcggagaccctcctgcacagatgccggaagggccctgaggcaggcttggagtctctgcacctgcggcttactgggaggtggggagaccatcacttgtccttttctcctctcctccacacacacctaccccacccctcactgggtttcttttttttttttttttttaaaaaaaaggacagaaccttttgcagtaggtggaagtagagtttgtggagtgagcaggaaccaactcttgtacagcagcctcggtgcctccttgtgtttacctaaaggggcaggcccctctgaggatgggggaagggagggctcagaccatttctggtttgctccctgcttggcagtggcccaaggtgtgctgggtcactgtgttgcagttgtatggagtgggactggagggggctgatggtgggggtggcctcttgccctcattctgagtgtcctggagctgtcttggcaccagcccttttccgggtacgggcactcgcaggagtcaggctgaccccccaacaagccatcgacaccatgaaattaaggaaagcagcaaaagatgttaaaaatcccccaaggctctgacaatccaaggacaacaggaaggtctttattttttcatctagactgtgcgggattattgcttccagacctgtatgtgggcttcagaataaacggaatgaccataatgttgttcccggtagacctggtttgaacattcgtgagcctctgaaaaggagaaagattttagaaggatgtgttggggcaatctcaagtaccgtgggtctatagacagtcatcgaagacactttatgtgctgggcacacatggccaagtctgagtgggtacagaaatggtaatgagatatagtccttgcctgcagagaacttacattctcaccgggagtcaggatgagggcgagacaccagctcattaacacccttccctcctgagcagttcagcctccaaatactacaggaatgccccggaggttttaggtggaggtgagattgagctgggccttgaggaaggagaagtcttgagtagtggagaataaaaagggacttggccaggtgcgcttgaagtcccagctactcaggaggctgagacacgaggatcgcttgagcccaggaggctactcaggaggctgagacacgaggatcgcttgagcccaggaggctactcaggaggctgagacaggaggatcgcttgaagccaggagttcaaggctgcagccctgtgacagcgcctggaaatagacacggcactccagcctgggtggcgtcatgagaccccatctgtaagaaggtcttttccaatgcggaaggcagcaagggcccacacagggcagctgcaggatccagggggacactggggacaggttctctctggcagctccactgctgctccaggctttcccgattgcctcacccggccttccaatggggtggaggtagtggtagtctacaggcagtgtggtccagtggttacacttgggggctcagagccgccagccccttgggattaaatctcaccaggctgcgcctctccctgtggcacaaggttctcacctcatgcatctcatttgcctcatttgtttttttgtgtgtgtggtgttttttaattttatttatttatttatttttgagacggagtctcactctgtctcccaggctggagtgcaatggcatgatctcagcttactgcaacctccgcctcccaggttcaagtgattctcctgcctcagcctcctgagtggctgggattgtaggaacgtgccactgcgcccagctaatttttatatttttactagagatggggtttcaccatgttggtcaggctgatctcgaactcctgacctcgtgatctgcctgccttggcctcccaaagtgctgtgattacaggcatgagccaccacgcccagcctgcctcatttgttaaatgggacagtgctatgttgttgtaaaggttaaacgagttcatatttgaaaaagctgagaaatgcctgctctgtaacctgttagctgctgtcatgatcatgattgtcattgacaggaggatggagaaggctggggttacgccattgctaggacgttccagaagcctccatgatcttcccttactgtggtcagagcatggtgcagggtctctcccccagcccctcagcactggagccagctgcactgtacccgccctggctctctaggttctgagttttgggactccctttgcatactaggtcacatggaacttgccgtcattcccaggctcccctggaaactctctgtgggtggcagcggcaggaggacttacccgaggccgatgagccacagaagcgggactgaggttgcgtcacacccctactggcacctgggaattactctggagattctttttttattttttatttttttgagatggagtcttgctctgttgcccaggctggagtgcagtggcacgatctcggttcactgcaacctctgcctcccaggttcaagcaattctcatgcctcagcctcctgagtagctgggattacaggcatgtgccaccgtgcccagctaatttttgtattttttagtagagatggggttttaccatactggccaggctggtctcgaactccggacctcaggtgatccacccgcctcagcctcccaaagtgctgggatcacaggcatgagccaccgtgcccagccactctggagtttctctgtggctttcaggagattcctgaaggggcaccagccacgattaaaaagctctatgctgtcgtgacttctgagtcctgggcagggagggaggctgcacccacacaggaagcagcttctgccgtgattcagtgtgctggctcgccgtggtggacagggctgcaccctcacccagcgccccgggagctgacttacgggaagggcaaggaattgcaccctcagagaacacttccccagtcagctaacccggtgacaggcgagcgtgggaagggcacaagcacagggtttcttcctcttctcccccagccccgtctccgcgcctgttctcgctgcctcttgcctcctcacgtccaagcttgtctgctctggcgcattcaggggacctggactggagagaaaaagccacctcgtacggttagtctgtggctctgtctgacttgtgtcctccgccgaggcccctcagttgtgagacagctggctgagcctaagtcctggggccagccctctccctagtctgttgcaaaggtagaaaggcatgcccaggcaggggccacctgccctgcccgctcacgccagaccgcaggcacttgcccgtcagatctccccggcctgcccagagggattctgatagccgagggcaatgcacctggcagcggagcattgcgtttgcgacagtccaccttcttcctggaaccaccccccacaagtgtgaccagctcaagccaggacaggtacagggggacccaggattgccacttaggggcagtggtctggaatccaggtccaggtgacatgggagccaaccctctgcttggagatcccaggtgggtgtttgcagaggacatctcacttgaggacccatggaaggggacacttcccaccccctacctggtccttgggctgccctcctctgacactctcctgccatcccaggcagccctgacagccccatgtgactgggacctagaggtggcccctgtttccgccccagtgtttgtccacaggcagtgttgcgtgggctctgaagtttgcctaagatggacctgataaggggagttcagtacacatcagtgcaggcccggccagggggtgatgatggcagttcctgggcagatccagctggctttagggtaggaggggctccagagagaggctccaggcccctaggggtgtgaacctttggggtgaggcgggaagtgacgcgctgggttcctgcgcctctgtttgttggagctattaccttggaaacatcccagctctaggcggttgccagggatttatggggatcagtgggtgccaatccctgggtgaagccctcggggcttgtacacagcacacagcgctgtggccccatggctcactttgctgtgtgaagtggctcagtctccgggagagtccttagccaggcaggcctgacggcaactgccaggtcatggtgatctggaatcgctgaccaaagggagtcagtcctggtgggtggagggacttggtgggcagccatcgtgatgccaggcatggggatcgtgtgtcacccaggcctgtgggtgccgagcttctgtgggagcagtgaagtgcccccgtggccgatgggctggtcacccctgcccctttcctgatgtgacagttgtgcctgggccccgggaaatttgccaggaggcctggcattggcctgctctactggagcggccctgctgagctgtgagctgcccgtctccctgaggttcctagcccatttcaactctccatgtggatttggtcattcattccagaagcgtctgccgggcgctgctgagtgtcaggttctgtttgcctcctctcctgtacgctggaggctctgggcaccagctctgcagggtggcctggccttgggtctccagggtagagcatggcactctctgctcccagcccagtttctctctgctttatctccctgaccccaccctgggcatgggcccatttgcagcccctgtgaagggagacattgagctgttgctggcagaggaggggcggctcctgggcactgcttgccaatggcctctcggcagctctgtgacagctgagctttgttcccagcctaatctgacctggttctccaaagcatgactgttggcagcctgaaaacctccaggacaggaaacaggagtggcgcagggaatgtaagatgatcccagcttcaagtcactgggcggcccttagacccaggctgcctgctgtctctggcaggaactcaagtcgctggtcatcctcagagcggtgttggcccggggccttcagtggcctttgtgtctgggtgagaggaaccctggatggccactctgccctgagtgtgtgggtccccagaagtgctgggttagggggcacggagggccagaaagtcccctttggagcgctggactctctcgctgactcctaccccaccccggcctggggtttcagagaaggggtccaggcaggagtgtcatcttttctcaatggggatgtggcttcagtctctgtccaggtgggtgcattgctctctttccggctcctcccaggctgcttaaatgacctgtgacgaggcctgcgccatggccggggccctctgcttttcccagcgctgcacctgggaaccaggggttgggccccggaagccgaggatgtccctgaatgccatgcctgggcacctgtcctggccaggcgaggcgtgttggggcagcggctgagatgggagcagcagcattgcctgccaggtttgagatgggccccgggtgagtgtggttaccaggaagggctgggcagagcaggcgggtgggccgcccctggggccttgttccgcagatcaacctgatccgcaccctggggccggggcttcctttcacagccttcccatgaactatggctcctgtttccatcccaaatcagatcccagaagaggaataatgtccatgtaacccaagccagttggaagtgggttacatccaacccctgtcatcttccagcttgttaaggacttgactaactcaacccagagggatttggagggttgtctgcaaaacccactaataacagggaactttagctctgtagccacagggtctacagaggtgtcgggctgtcgggttattgctgggaggtgagccggtggcgtagacaccatggaggcaccggtagtggaagagctgcaagtgcacacagaggccggcaccgaggggcggggaggaggaggtggtggatttctcgccagtgttggcatcatgttgcctccagcatcagagacccaaggtgtggctgaccttggctggggcgatgagtcattggatagcagagccttcctggtagctgggggttaacgctttaactgccgggactttgtattatgccgcttcttttttttgttttgtttggtttggtttggtttggtttttgagacggagtctcactctgtcacccaggctggagtgtggtggctcaatcttggctcactgcaacctctgcctcctgggttcaagcaattctcctgcctcagcctcctgaatagctgggattacaggcacgcgccaccatgcctggctaatttttgtatttttagtagagatggggtttcgccatgttggccgggttggtttcaaactcctgacctcaggtgatccacctgccccggcctcccaaagtgctgggattacaggcatgagctaccgcgcccagcttgcatttatgcttttttttttttttttttgagatggagtttcgctcttgttgcccaggctggagtgcaaaggcgcgatctcagctcactgcaacctccacctcccgggttcaagcgattctcttgcctcagcctcccaagtagctgggattacaggcctgcgtcaccatgcccggctaattttgtatttttagtacagacggggtgtccccatgttggtcaggctggtctcgaactcccgacctcaggtgatccgcccgccttggcctcccaaagtgctgggattacaggcgtgagccaccgcacccggcctatgctttttattattattatttaattttttaaggaaagcaatctaaactgtacactgtatcttttctttctcttttgctttttgttgtcagttttctgtattacttattgccaaacaacatgaacaggaaattgaaaggaaaacttcaacaatcattggctgtagcatttcttctgtgttccattcagtgcttgtctcctcaggaacatgacatagggtttgatttaattatgaaaggcgtatattttcagagttttatactccccatagaatgaatgttgaattctgttcttttcacttgaaattagatctcaggcatggatttcatgattatcactataatggctcttcagagtggacattgcatcttgtagggaaccaccctctccccagctgctggtgtggacgctcctccttgatggtgtgggtctgggcccctgaagggtggtgtcctgagtaaagatgttacagtagccatgcttatagctttgggcctggggctaggtggagactggcttcaaccctagagcttgctgtcttaaaataaattcttttttttttttttttgagatggagtctcgctctgttgcccaggctggagtgcagtggcgcgatctccgctcactgcaagctccgcctcccgggttcacaccattctcctgcctcagcatcccgcatagctgggactacaggcacccgcccccacgcccggctaattttttgtatttttttagtagaggcggggtttcaccatgttagccaggatggtctcaatcttctgacctcgtgatccactcgcctcagcctccaaagtgctgggataaaataaattcttagggccgggagcggtggctcacacctgtaatcccagcactttgagaggccgaggcgggcagatcacaaggtcagaagatcgagaccatggtgaaaccccgtctctactaaaaatacaaaaaattagctgggtgcagtggcgggcgcctgtagtcccagctactcgggaggctgaggcaggagaatggcatgaacccggaaggcggagcttgcagtgagccgagattgcgccagtgcactccagcctgggcgacagagtgagaccctgtctcataaataaataaataaataaataaataaataaattcttatacccacttgcattatttattattattattattaaacagggtcttgctgtgttgcccaggttggagtgcagtggcgtgatcatgacctcccagtctcgacctcccagtttcaattggtcctcccttctcagcctcctgagtagctgggactacaggtgtgcgctgcatgcctggctaattttttttttttttttttttttgagacagagtcttactctgttgcccaggctggagtgccgtggtgcaatctcggctcactgcaacccccggctcctggattaaagcaattctcctgcctcagcctcctgaatagctgcgattacaggcatgtgccgccacacctggctaatttttgtatttttagtagggacggggtttcaccatgttggtcaggctggtctcaaactcctgacctcgtgatccacctgccttggcctcccaaagtgctgggattacaggtgggagccaccgcgcctggcatgcctggctaatttttaaaaaatttttgtagcagccgggcgcggtggctcatgcctgtaatcctagcactttgggaggccaaggaggtcgggagttcgagaccagcctgaccaacatggagaaaccctgtctctactaaaactacaaaattagctgggcatggtggcacatgcctgtaatcccagctactcaggaggctgaggcaggagaattgcttgaatctaggaggcgggggttgcagtgagctgagatcgtgccacggcactccagcctgggcaaagagagtgaaactccgtctcaaaaaatttttgtttttgtttttgtagcgacagggtcttgttttgttgttgcctaggctggtactgaatttccagcctcaagcgatcctcctgcctcagcctcccaaagcgctgggagtacaggcgtgagtcactgtgcctggcctccacttgctttggctgcctttctctgtcttaggtaaccatacatttctccaggtaattaagaaaagattgcgcatgatgagtcccttttctggtatttctgggattgcccccaaaaccagacaagtgttcttaccttgacattttattaagactttaatgaacagaatgccgtttgccctcagtctgctggtccccctgcgaaggcccagggcttccttgtttgaaaagtcatccccttgtcgaggtctttgattccttttcaccacggcagtcatgccgagggtccacagagccaccccttccccatctcttcctcggcccctcaagacgcatctgtacccccggagatgtctctttgttttcttgggccacctctcctggccgtcactcaccctgctgactcattacttgtgcaacagtttcttctggaaccctcaggctcctgccacctaccctctgcagtccccgttttgttcctcttgcctcagtcttcctccccatcacccctctacctgttggtctccatctctgtctatggcacatccctgtgttatactctgatggctggataaaggttgagtgaaacgcatctacccctttggtgactggggtgcccattaatcagaagggatccaaggctggcgtagccttttcccgcatcctggggtatcgtcctgtggctcttccttgttggagtctgcagttttttgtttttttttttttaaattttttgagatggagtctcgctctgtcgcccaggctggagtgcagtggtgagatcccagctcactgcaacctccgcctcccgggttcaaccaattctcctgcttcagcctcccaagtagctgggactacaggcgcccgccaccatgcctggccaattttggtatttttagtagagacggggtttccctacattggccgggctggtctcgaactcttgacctcaggtgataggctcgcgtcggcctcccaaagtgctgagattacgggcatgagccaccaggcccggccgttgagattaccttcataagccaccaggcctggctgtagttggcagtttttgaccactggtctcgctccacgtgatctgtgatcttccccttggccccctggccctgccctgttcatctgctcacctttctcatgcatgcggtttgttcatagggtatgtaatggggtctaaccaggaaatggaaaccgcttgagcatttatttatttatttatttatttatttatttatttatttttcccaagacaaggtctcactctgtcacgcaagctgaagtgcagtggtgtgatcacagctcatggcagccttgaactcctgagctcaagcgatcctcccttctcagcctcccaagtagctcggactataggtgcacactatatgcctgcctaattttttcttttatttttgtagagacagggtcttgctttgttgcccaggctggtcctgaactcccaacctcaagcaatcctcctgcctcagcctcccaaagtactggagctacaggcatgtgccatcacgccttgctaatttttgtattttttgtgtgtgtgtaaagacaaggtcttactatgttgcccaggttggtcttgtactcctgggtttatgtgatcctcctgcctgggcctcccaaagtgctgggattacaggcgggagccacagtgcctggtccacttgagcatttagaacagaaggacttaaaggcggggaactagttacacagatgatgggagaggtgaaggccagacagggaacagagaggcaatcagcaggaaatcaaagtggtgtgggcttatacagccctctaaaggtatggatgcaatgattcatttagaatgagaaaataaataacagcaaattataaattataagcagctgttaaatatcacaaacatcactacatgcagaagagtaccagtcaactgtcagtcatatctccaaagttctatttctcccacatttttggcattacttcttcaatatgatgactttgtaatatcgttttctatttcgagaacagaaaactgatcaggctggacacagtggctcgtgcctgtaatcccagcactttgggaggccaaggcaggtggatcacttgaggccaggagttcaagaccggtccgggcagcgtggcgaaaccccgtctctactaaaaatacaaaaactagcagggcatggtggcatacacctgtagtcccagttacttaggaggctgaggtgggaggattgcttgagcccaggaggtcgaggctgcagtgagccgtgatcatgccactgcactccagcctgggtgagagagtgagaccatgtctcaaaaaaaaaaaaaaaacaacaaaaaaaaacataggctgggcgtggtggctcacgcctgtaattccagcactgtgggaggttgagatgggcggatcacttgaggtcaggagtttgaaaccagcctggtcaacatggtgaaaccccatctctaccaaaaacataaaaaattagccaggtgtgatgacgcacgcctgtaatcccagctacttgggaggctgaggcaggagaatggcttgaacccaggaggcagaggttgcagtgggccaagatcgtgccattgcactccagcctgggcaacagagtgagactccatctcaaaaataaataaataaataaagcgaatgaatctccttagttgatcaaattttgtttttatttttggtagttgggatgtatacaaaagtggcggtcaacatggagttggtggtgctgctacaattgttttgttcaagatacacaggaattctggtaaatcctgtttttttctttttttttaaatgtgattcccatcaagaaagaagtaggaaaatgggggagatttctaactgcatatgaggcatttgtgcatgtatttctgaccagagagacttttctgttttgactccacattgaaggaactgaatcctttgcttacaacttcacctctggtgatgggagtaattttccacagatttgcttctggacccgtgcatttcaaatcttgcttctctccactgcgcacgtttttccggcgccaggcaccgcaggatatgttcgtgtcttgtgatttttgattctgcgcggtaggtggaattggaacggtgagtggagcgagtattgctggaatccgtttccacaccgggatagcgagcagtaactgaactatacatggaaataaatgggaactacataaatataacccgaccaaagccaaactaaatatctttccagttcaacttctccttagcaggagcccccacgtggcagcaagcctccgtttccacctcacacaagagaaaatgtgacgggcaggaactcaagactggaaatgaacggggacgttaattgattgtagggaaaatattttccattttgtaaattttacaaaaaatgtttgaccctgtggacatgtggttagggcccttctcagtgccttgagagggaaccatgcaggtagagggagggttcttagcattgtgggggtgacctggagattggcagcagggtgccaccaccacccctaggtggggatgagagggaggaagtcctgtgaccagagtccaggggccagagtcacctgctgggagcccaaacaaaggtgggactctggcaggagctggaactacacagaggaccacctctcctgctggagaagctgtctgaggcagaggaggtggagagctcccgcgccctcccttgcttccacctcccaggttcctcccaagcctctcgttggttgaacccagcccaaagccagcaggcctggggacctggacacctgagccagcagaggtcggcgtttctcccacacaaaggagggcacaagaagtgggaggcacggagggggatcaggccaggacccacacaggatgtgcaaacaggagctcccctctcttcccaccccaaatggcatctgcagccggcctcacttccctgctgttagacaggaagaggaaccttgttcccggcaccagctgcccccaccgccccccaccccacggaggcccctttcctctctggcctttgcttgcaatcattggcgacgctgatggaccatatcttctggggagtttggtcatgaacatggtttcccatttgttgtggaccaaactgtgcccttccccttgaattcctgcgttgaagccctaactcccaatgcagctgtaattgaagatagggcttttagggaggtaattaaggttaaatgaagtcatagggcaggaccctaatctaataggattgatgtccttataagaagagggagagacaccagagatctctcctcccccctcacttgtaaacagaggaaaaatgacggaggacacagcagggaggtgggtacaagccaggaagaggggcctcgccgggaactaaccctgacggcaccttgatccgggactttgggcctctcaaactgagaaatacatgtctgttgtttaagtcactccctccacagtaatctggatggcagcctgagcttaccaaggcaccgtctgcatcagccagggctctccagggagacagccaataggagatggatggatggatggatggctagatagacagacaagcggacagagagagagagagacaggcagacacagacagacaggcagacaaatggctagatagacaagcagacagagagatagagacagacagacacaaacaggcaaacagacaggcagacaaatggatagatagatgatagatagccaggcaggcagatagacacagacaggcagacagacagacagacagatgataggttgggttcagtgactcttacctgtaataaccagcacattggtaggctgaggccggtggatcacttgaggccaggagtttgagaccagcctggctaacagggtgaaaccccatctctactaaaaatagaaaaattagctgggcgtggtggtgcatgtctgtaatcccagccactcgggaggctgaggcacgagaatcacttgaacctgggaggtggaggttgcagtgagctgagatcacgccactgcactccagcctaggcgacaaagtgagactccatctcaaaaagaaaaaaaagatagatagatgaatggatagatagctagatagatgacagatggatgataggtagatagataattgataaatagatataaatgaccgatggacaggcagacatagatacattgattaggtagatgatagatggatagatagaagatagatggtggatgggtgggtagataggcagatagacagttagaaagatagatgatagatagataggaaggaatttattaggggaattggctcataccattgtggaggccaagatgtaccacagaaggccgtccgcaagctggaggcccaggaaagccagtatcgtggctcagtccaagtctgcaggcctcaggactgggaagctgttgatgtaactcttagtttaaggccaaaggtttgagagcctggggaactgctggagaactgggagttctaagtccaagggcaggagaggaaggcatcccacctccaggagaaagagggaattcaccttttctctgcctttttgttgtctggcaatggaatggtgtcatccatattgagggaggatctttaccactcagcccaccaactcacatgcccatctcctccagaaacaccctcacagacacacccagaagcgatgcgttaccagccatcccttaatccagccaaactgacacctgccgtcagccaccacacaggctcagaagaatcgtggttgcatggtgatggtctccatcccgtctaaagaagttgaagatgaactgttggcacaagccatcgttctttcaggctccttccagtcgttcattcttttaaaaatgtattcattgagcacctgctgcatgccaggtgctgtgacaagcactggggcacagcagtgagcaaacaaggactcttgtttcttggagtttacatgcagtagaaggaaacagaatcaatgaattcatcagttctagaaactatcaaaataggactaagagctgtggtgagaattaagataaggtgattgcatagaaagtgactgatggctgctttggaatgagtggtgaggggtcacagagatgatgacagctgagttgagattgggaagacaggaaggagccagcagtgcaaggactaggctggaagcaagcttggtgcattccaggaacagcaaggaggccagaggggctgcagtagagcaggcgaggaggaggagggagacgcaggtcaaagaggagcctggggccagatggaggaccctccctccaaagctcagtcatttcctccttaaaggagaatgtgttacctccaaaagtcacatatgccagcacagtgtctggctcatcatatgccttcagtaggcggtgagcatggctgttcttgttattactacatcacaattactaggaataatggagtcaccaggctttgcatttacagcaatgtgagggagtcagcaagcttccctggggaacccatctcccctcactaagttcataagagcctgataaccaggtcaatgtagtgagagctatagctgcccagtgtactggactctttagccacgggccaggacactttcatctcagcagaaacctctaaggggactggggagtgtgctgtggatgtttctgggttactcagacctcctggggagccttccccaccgcagctgctgcagggagctcagctgcagtgatgaactgcggctcagccttgtttatgggaaaaccctacatgggagatgggacggtttcctgttggttctctcggcctcaggttgctttcacaagtgcagggattctcacctgggtgtgtgaatggggctcaggatgccccaagggtatgtggagatgggggtcagctgtcttctctgatgcctctgaacctcctccccctgcctttctgcatctcattgcttcctggcctctctcactttgggtgctttggaacaacatgcaatccaatacacaggctgactttattattttgttttgttttattttattttattttggaaacaaaggctctgtcattcagcctggagtgcagcggtgcaattgcaactcactgcagccttgaacttctgggctcaagtgattctctcgcctcagcctctcaaagtgctgggattacaggcatgagctgctgtgcctggcctaggctggctttaaaagctcctcactctctctgcatcctgatgatacctacctcctggagcaggctcccagccattggcttcggatactttgtagctattattggccagttgtggcatgtgaagctgaggctcaggagaagggcagtcctgtccaaggccacacggctcagtgctaacactcagacttcagtgtttttatctccctcctggtcgcttccacccttagtgcatctctggaggcccaagggagctaaaggccaggctttggtcagctaagaatttaaaaaagctgtctctgtgctcctctgtcaatccatcactccattatctcccccgacaatgaattcagtttgaatttcagataaacaaggattaatttttagtataagcatatcccacaacagacttgggatatacttatgcctaaaaatgattcattgtttgctggccttagtagctcatgcctacaatcccagtgctttgggaggctacagttggagaattgcttgagtccaggagttcaaggttacagtgagccatgatcatgccactgagctccagcttgggtgaagcagcaagatccttatctcttcaaaaaattgttgattgtttatctgaaatccaggtttaactgagcatcctgtattttatatgagaaccctatataggtgagacccagagtcccaatgcccactggtaagcctttgcagggaggctctgtgggtccttggctggcactgatgccctgtgatgagcagggccatctggcaaggtggacgcctgctgcccatgcaggcagagcaaggccctgggcaggtatgagctgatctcaccttccccagcctgggagccagatactgttggcagcttgccgtcaagagaggggctggtcaccaagagaggggcggcctccatgggccttctttggcttttggctctcccccagccctcctcctaccccaaacagaggccaacggcaccgcaccagaaccagtgtgctgcctcctttggttggcattttgtagttgggtagactgtttccttctcacaggagctggtggtgccccttccgcttcacagggaggatggctgagacccctgaccttgacacagggtgctgttctttttttgttttgagacagagtcttggtcttttcacccaggttggagtgcagtggcatgatgttggctcactgcagcctccacctcctgggttctagcaattcttctgcctcagcctcctgagtagctgagattacaggcgtgcaccaccactgagaacaatgccttctacagtgtttattctcctgtaggagcaagttcctaaggcaaggaggttgctcccctcatggatgaataaattgactttgatccacagccccacgtgtcagccttgagggtggggaaaggttgttctgtgtctaggcagggggtgggggcaaggccaggagggcctggtgcccagtgtacctcttcaggacacaactccaggtagcagaggccaaggacagaggggaggagaagagggaggtggccattatctccttatctcagcttcctttggagataagcttgagtattttagttgtccactaagtctggagataagtctggaatttaaacctttgactttgatccagcccttcacagctcctgtgagcaaactgagcctcagaaaaagggagtgaagcctgtgcatcctggacgcccccaccccaggctcaaaccgcccccaccccaggctcaaaccgcccccatcccagctcaaaccgcccccatcccaggctcaaagcgcccccatcccagctcaaagcgcccccatcccaggctcaaagtgcccccatcccaggctcaaagcgcccccaccccaggctcaaaccgcccccatcccagctcaaaccgcccccatcccagctcaaaccacccccaacacaggctcaaaccaccctcaacccaggctcaaagcacccccaccccaggctcaaagcatccccaccccaggctcaaagtgcccgcaacccaggcttaaagcgcccccaccccagctcaaaccgccctatcccaggctcaaaccgctcccaccccaggctcaaaccacccccatcctaggctcaaaccgcccccaccccaggctcaaagtgggaaggagccacagggaaacaaacgggggaggcacggatgaccaggatgagggtctccatgacccacctttccccaggggctatctcaagagctttttaaacttttattattttttaatagagatggggtcttgctgtgttgcccaggctgatctccaactcctagcctcaagccatcctcccacctcagcctcccaaactgctgaggttacaggtgtgagccactgcacctggcctctctcaggagtttcaagaaaaaaaatgggaatagatttgtgtgtgtgtgtgtgtgtgtgtgtgtgtgtgtgtgtgtgtgtgttttgagaaagagtttcgctctgtcacccaggctggagtgcaatggcacgatctcggctcactgcaacctccgcctctcgggctcaagtgcttcttctgcctcagcttcctgagtagctgggattacaaacatgcaggctgattttgtattttcattagagacggggtttcaccatgttggtcaggctgatctcgaactccggacctcagatgatttgcctgccttggcctctcaaagtgctgggattacaggcctgagccaccgtgcccggccaggaatagattcttttctgtagatgacttctgtcattattgaaaatggatgtttatgcacaattgaattgtcataacgcctcatcctaaaaagctcctttttgagaaaatgtgacttttgatagaggagagactgtccaggcctcattcattgtcagcacaaaggcagagcaggggtgtggcggtgtcaccctcctctgagacagccccatccctgctctgcccaggggttcagaagtctggtctattcgagcccacagaggggtttggagtggctgtcttacatcacaggtggggtctgtaaggatctgaaatgacctttgagaaggcgggtgtggtgggtgcatttcaatcattaaagtaacaacaatgatacatcaaatagtgtctgctcagattctgagtgcctgtttaaacatttccatcttgtgacttgccagattctagcataacaacccaggtaaaagaaaaaatagctgggcgtggtggcttgtgcctgtaatcccagcgtgaggccaaggcaggaggattgcttgagaccaggagtttgagaccagcctgggccacctgagaccccacctctgaaaataaacaaaccaataaaagaccttcatgctctatgtctttcttatatctaggttccccaaattatatgcattggggaaagtccattaagagaagcccctggccgggcgtggtggctcacgtctgtaatcccagcactttgggaggccaaggtgggaggatcacaaggtcaggagttcgagaccagcctggccaacatggtgaaaccccatctctactaaaaatacaaaaattagccgggcgtggtagtgcatgcttgtaatcccagctacgcaggaggttgaggcaggagaatcacttgaacctgggaggtagaggttgcagtgagccaagttggtgccactgcactccagcctgggcgacagaaaaagactccatctctaaataaataaataaagggagagaagcctctgggctcctagatacatgggtcagtgtccacccctgcaaagctgctgtgcccaaagaggggctgtacttggtggaattggggcaaaagagcagggagggcactgggcagttgacctggtctccactactggaaaggggctgtgctgctggtgccctgagctggttccacaaggaagacactgcacagggcgccctaagtttgctctttctgcctaggctcaccctttcctctccaggaccagggagccccgctcgtctcctgtcttcggcatctgctctctggcttgtgagcactgcatttctttctgcttggaacgccggcccatggtgggtccccggactcctgccttctgctgtcttttgccatatctcgtcaaagtgtgttttatttatttattgttattattttttgaaacagagtcttgctctgtcgcccaggctggagtgcaatggtgtgatctcggctcactgcaacctccgtctcctgggttcaagcgattctcctgccttggcctcccgagtagctgggattacaggcgaatgccaccacgcccggctaatttttgtatttttagtagagatggggtttccctatgttggtcaggctggtctcgaactgacctcgggtgactggcccacgtcagcctcccaaattgctgggattacaggcgtgagtcaccatgcctggccaactattataatattgatattataataatatcacagccagataacggtgactaacgcctgtaatccgaacactttgggaggctgaggcaggcagatcacctgaggtcagttcgagaccagcctggccaacgtggtgaaaccctgtctctaccgaatatacaaaaattagccggagcgtgatggcaggtgcctgtaatctcagctacttgggaggcggaggttgcggtgaactgagatcgtgccactgcagtccaacctgggtgacagagcaagactccatctcaaaagtagtaataataataataataataataatatcacttattgagttttaattttgtgccaggcactgtgctagtacttgcgccatgtgacctcattgactcggaacaacctatgagtaagcaccatctctgtccccaaggaagctgagactcaggaaatggaagtcatctcccagggcccacagcaagggcctggcgaggtctgcgttcaaattctgatcatctgactccaggctttcctgcctcctttgcctcccaaaaactcaaatactttcatctgggatgactccagacagctagatttcaattgtcttctctccttctgagtatgttttattttaaaatcacataaagataactcacttctcaactggagccacggaatcgttagatgtcttggagacttttctagctacctctttgctggactcagacacaggcctgaataattaggtccaaggagctgaactggagccgctcgtggccagaggtcccttcctgggaacagcagtggcggcagcggctgcgctgagcctggcaatttgttcaagagcaggggatgctcaggctgcgctcgcccccttcttatgaacggtttgctttgcgtcttctctgtgccaagggctgccaggcaccagatgcccattttaggaaatcagaaaaataaacagtgtaaataaaacaaaaactccacccaagaaatctgagacagatgctgttttccccaccgtttctccacccccatgctgggtttggagagagtgggccagcatgtttcctacggataagaggccctggggtatttaacctggatggaacctcttctattttccttttgcctggtgctagggggcagaaggcaggggtggtgtccatctggcccagggaggaggatagggcagcctttgtcgccggcatcccctgcagagatgtctcagccagaagtgactccatcctcaggaacgtgtgtcctgttctttgctgggcggcccctccttaccccccattgtttccacagtggggtgtgctagatttatgggcagagttctggttcactctcagccccggacagcagaatgtcccagtagtgcactgatggtgtgtgcgtggggatgtgtggaacaggggatagtgaccccgtgtgcgttatatgcagtgcggcttccagtcgggtgtgtgaagggggtgctcatggccatcgtggaagtgagctcagctggggctggagggtccaggctcactgtatgccactcagcagccttgggagtggggttcatcctcctccccgctcctctcccctcctggtcctgggcagcccaccggagctgcactctgggccatctctcctggtcttaaggaggctgtcatttctgggaggcagatgctggcccttccatccttgcttcctggagatctgcgccgaggtctgcctttctgtctggagggactggccaggaacccctgggttttcctggtggggtttttgttgcttagcagtgagcagagtgagtgggcaccaagaggaggatgctgggtgaggtcacggacatggctggggcaggctgggggtgctggaggtgaattccgcagctgtgcgaccttgggcagtttgcccagccctgggcctcgcttcctcctctatgaaatggggcgggagcacctgcctgctggggttgtgggttgggtgaatcggagctaaggtacagctcacagcctgccgtcagaccctcgcaagcagaagtgggtgtccctgctcagcgtcctccggtccctccttcaaggctcagctttgtcctcatctcctccatgaagcctccctggttactccaggagtcacgacccacaccctctttggagccttgtgtcacacgcatttctcacggtgttgctttccctggaggatgggttcaactaaaattggggcccatctgggggttccctccagcaccagagaagctcaggcttagtagagatgggtaccctgtcaatactagttccgcgaaggatacactgtgctcattctgctgccagttgctgagtctggtgtcctgtagttatggaacatgtgtacaggcctgggctgctggacacgaaggccagatgggcagttcactctgcctccgctctgagcctttagaaacaagctggctgcacccatttccatctggtcacagtttaggagtggggttgtggaatggatggaaggaaggatgagtgggtgggtgggggggtgggtgggtgggtggatggatggatggatgatgggtggatgggttgatggatgggtggattaggtggacaggtgaatggattggtgggtgggtgggtgggtgaagggctgaataggtgggttgggtggatgggtggatggatgtgtggaggggtggtggggtggatggggtccatgggtgaatggatggatggatgggtgaatggagtaaatgagtgggtggatggatggatggatgctgcaagagcctttctggagggttccagggaggaactggcatctttgaccagcagccagcatggtgatcagatacagggaggtgtctgggtctgcctgatcccttatctcactgttggtgggactgggctggttatgtgtccctgaagctctctgaagggtggctgtatggcattgcccaggggacatccccagagtgccgtgctctacagcaatagggtggccgcctgtgctcccagggccgctcctcctggcagcctttcgggtttgcttggcttagcacctcagcaaatctcctcgagttaggacttgcctgccatgagcctctccaacaagcagccccaggccaaggcctgtgtgtgggcagagggagcgcatgccgcgggaggctgcattaatctgaggttctgtttttgttccctcctggggcaaaaggtaaaaatagcctgtcccactccatccccaaatccagcccggctgcacccagccctgggagtgaagggggctgggtcaggactgcccgtgagttgtagaccctggtgtagggaaaccctgattcataagacgggtggacatggaggaaggaggagactccgtccagcagagacacgcttgggtgcagcccagcttggagtctgatggacgtgggctcacctgtgtgcaactctcattcactgtgtggccacagggaagtgacactctgtggagactcagattccttatctgcaaaacaggggtagtagggcttgggggaggatgtgtgtgaaggtttggcccagggcccctccagcagccagacagcagtggctgtcatccctccagcgtccagggttacctgggggagtagggcctctgtccccagatgggccccgtttctggctctggaactcacagcaggagcaaaggcgaggacattcctggtgttaatcatccacccggagggagagcgccagtggccttgtgtgacctttgccctttgtctctgtctttaggaggcacgcggacctccagtggccggctccggaggcttggtgactccagtggcccaggtaggtggctcgctccgctctggccccacccagctcatgggtgtgtttgtgctggggtcccttcattctggtctgggacctgcctccccacctggcttccctggatgagtggggccacttgcccatttcccagggagacgcagtctttgacggctttggactcaggtggcttccaggcctgtcgacgctgccctgctggagatgatccttgtgggggcaggggcagccacccccaggctcagggagcaagcccgtgtgtgcgggacagaggagagaacaggagatagatagggctggatgatttggtttgagatgctgaggggacagatgtgccatggacaggtggctttggccgtgagcctctcggtgttggttcagtatctgtgggctccctgcaaccttgcaggatggaagatgctccaggatagagcagatacgtccggtgttatctaggaggaaataagtgggcctctggcagtggtcactgtgctactccttgtgctttttccatgtgtttggaaattttccacactaaccagtagggaagggaaacagatgcacccatcagagctctggggctggccgtccaggacacgagttacagcttataggcttgaagggactctaccaacactgggtgcagcctgggcaagggagtgggacagagaggtcagggctctgcctccagcccttgccccccagggctgagtctgcgcgtcatcttctccccactgggtgtccctgatctcccctgcctgaccccagtgtggccatgctagtgcctctgtttctgggagcctacgttgttcttggctgtcacttccagcggccaggctgggacaggtgcccatctagtggcttttctatttggagaggatgatgggtcacagcaatgaatggacttacctcccctaggagacgaggagctctgagaagagcagagatggcgtggtcacctgtgcatatgtgctgggggccaactgggtgccagacccctggctgccatcatggtggcagacaggcagggactgtgccttcatgaattagccattctagaggagacaaagttaccaaaggacacggacccggagtcaaatccacacaaatagagcgcctgtggaccagggctgccttcagaacaaggtgagacagccgtcctgccaggacaaggcgcctacgggggcaagggcatgtgcccatctggagccgccacctccatgctctagaccagctccgtctaatagaaccttctgtgatggtgggtctgttctatacatctgcactccgccatcctgtatggtagccgcttagccgcctgggtctattgcacactcaaagtataaatgtttacgtttactttattcactcatttacttgcatagaattatttatttattttaaatggatttccacttatatctacgtgtggctagtggctatgaaactgaacagttccagaccacactggcacctgagacctcagaattctagacccaaagcctgcttctgatcctgagcttgcttctgtggggacagcacagacgcctcctaagtctgccttccagaggtggatgcagtgcccgtggactgtgcaccaccaggcctggacagtggagagggtggctttttacagggagtgggagtggaggggatgccgtgtccacattgagtgcatgtgaggccccttgcagtacaggatgggactgtatgtgggaagaggggggtgatgctctggctggaggcccctgggcagctgcatgattcagcgctgtggttaagaggggctccgcccatcgcagtcatgttgggcactaaccactggacagcccagccgctgctgtgtttctggggagcttttctccggctccgcatctgatctgcctctccatctccttccctctcattggccagcttctggtggaatgggtggggagggtcccccagttcttgtgggggttgcatcttgggaacctggcaccctgggctgcatggacacagcctcccccggcggttgcttccctctgctcagactggctggttctgtgctgtcagcacttggcagccacgatcacagctcagcttggaagcctaaggcataatttgctgaatcccaaagctgcaagctggtgatctgggtttgcgtgggactgcctgctgacacacggggtcctccctctgtgggcctctgtgggctctggcccgagacaccctttcctcatcttcttggcttctttctttctccctgcctcccttttgctaagaccctggtccaggcaggagttcattcctagacgccccagcatctccggcctccccatttgacactccccagacgactgtctgccatcccatcctcccagcccagcttctctgtagatccacatctggccaatctcctatgtctgggactcttgccctccccagaaggacgaaggctcttctcgaggttgtgtttgggactgggccagggatgacatttctggcaaaagcttaaatgacaccatgatcaacgctttggtcagctcacacactttctttccttttaaaaaaaaaatggaattcttagagctacaaaacaaaaatgtaaagaataaggtaataaaacacctgtgtactcaccatcccgcttaagaagtgagacattgcaggtgtagccgcagccctgggtgaccttctccatcctagccccactcctgctgcggtgcccgcccctctggattgggatctggccccgggcaggcacatctgtgctgggcagtggtgtgtctgagaagcctaggtctccttttttttttttttgagatagagtctcgctctatcgcccaggctggagtgcagtggcaccatctcggctcactgcaacctctgcctcctgggttcaagcgattcttctgcctcagcctcctcagtagccaggattacaggcacccgccaccatgtctggctaattttttttgtatttttagtagacacagggtttcaccatgttggtcaggctggtctcatacccctgacctcaggtgatccacctgccttggcctcccaaagtgctgggattataggtgtgagccaccgcatccggcctggtctcctcttgcatacggtcatcagcatcgtgtgactgagcagcctaggtctgtctcctcttgaatgccgtcatcagcatcacatccttggtgcctcactggagtcagtggctgccctgcctgtgcccacaacgtgacggcgtggagacttatccgtgtagatccacgaagccttggttcacttattttggcagctagcgagtgttcctctgtgtggggaggcagagtttgcccgtcccgtggcccactggtgacatcgccgaaggtcttctctgttactagtgctgccgggaacgtgtgtttccccaggtggatttggctgggctgtggagatgcgcttctcagcccttctagatgttaccaccacgccctcccgagtggccttctggtaggctctcccatgttcgctcattttctgtgcctcaggcagccgcctctctgactgagcgtccagcggacttttgccctgtttcccacggtgcacggagcatttcatctcagtggtgcctgagcttccctccctctggccctcagaccccggctgggatccttggagccaactcctctgcctgacatcccgtgtcgctaggtcctgctcttccatcttccaatacctctggggtgtgtggccttttccccagtgcccccatcatcccttctgtcctaggttgaaccgtgtcccccacaaactcatgtccaccaaaaacctcagaatgtgacctgggagttggagatggggtctttgcagatgtaagtagttaaggatcttgagatgaggtcattctggattagggtgggccctaaatccaacaactggtgtccttaaaagaagcagagaggccacagacacaccggggagagccacgtgaaggcaggagcagatgatggagtgacgcagccccaggccagggagcgtctgggaagaggcaaggaaggaccccccccccaccccaccccagagcctccctagggagtgtggccttgctgacaccttgattttggacctctggcctccagcatgggagagaacccgcttccattttttcaagccccacagctgtggtccattatggcagccacaggacactgatgcacctcccacctggccgctgtggatggacgaccccgcccgcaggaagtctccctcaagcactgcaggtgtctctgccctcacaggggacgcctgcacaagtaggtgtgaaaaaagggccctgtgggggcaaggcctgggctggtgctcgctgcctcccttcatcctatgctagttcccatgcctcttccggcaggagtgcctggctccacctggtgaatcagagccaaactctcctgacaattggctgtcacttatttaactgccaccatccccaggagacagaaaatgccagaagggtggggcctgtgcagtgcctcctcgctatttccccagggcaccgtgccacgttgcctcaatgcacagagtagctgctcaaagtgtgtcggacgaacaggtgccccatgcccagccatgcagacaaaagtgtgccacgtggagggagctggtcgtggaagagaccaccagcatcttggctgcccgaggaccttgcccctgggctcttgcaggcacccctagttcattacttcctctctcacccatagctacccactcttcctctatttctctgatatcagccttgccacccacccaggtttgcaagcaggaaatctcagagttgaccttgacctctgcctccccagcacccccaggtctcaacaggctgccaagatctcatcaactcgccctctgcatactgacccttggacaggctgccccggtcacggtcatgtcttggttgggcctccatcatccctccttggaccagcaggtgccatcctccccacccctgccctgctgtggctccttcccctccacggccaacatttagaggacgattaccacttccctccctgtgtgctggggaccgggtgataggatccctccacccgatcatttccattagacctgggccgggtcttcttactcatagagcccttagtttccgcccccaaagcctcgagggtggattcgtgctgccgcccagcctggccctgataccgctttccagcctggagccccctgcttctgcgctcctggctctgagtgctcgggccccccctggatgggttgccacttgtcctctggaaagcagggcttccatgctcctggacctcctagctgactcagtgactttgggccatcttgtcacaccccttctatcagcttggccttggttatttctgtgtcctccatagcctcggaccagagccacggcgggatgctttcctggtgcgtggcaggcagtcaggaaatattgctggactgaccttgataggagatgcttgggagaattgcccaaaaaactagcttaaaatgcaaatattggccttcttttgcgttggctaaagagtagcatttctccgtttgcctcccgggtaagaaattgatggcgaatgcaatgtctctagggaggagaagaaggtgacaaaaagggtctgtataacggggcacacgctaggcatttgtgactatttaagtttaaattataacataaatgcgaaactctttgccttggtagcccttccacattgcaagcgttcactgccacatgtggctgccatattgactacggcagatacagaacattgacatcattgcggagagttctatgggggggcgctggtttagatcatcttcacgttggatccacaaattcattgtttatccagtgaacggttactgggcacctactgagcaagcaggatgaaagacacccgctctcgggggagtcttccgttggctgcagagaagcttaaactcaggggacctggggcaaactctgcaagggcccttggcctctgcacccccagacctccctcgctctgcaggggcagtcgggggccccctctaggaatggagcgccagctccagctcctgtcaggctacagcccagatggttggctgagcacgagcatgtgagagtggaattgggcccaaccgggctgcttctccccgttgtcttggtttccttccacgctgacctggaaggactcctaaagcaacaggcctgcccaggcggtttgcaccagtaaaccctgcagcggccccaagggcagagatagctggattgtatttatttaggaacagccaaagtctgaggcacaataaaaagtggagaaagattccagagaggaatgcagctggcctcagcctgggaatccgtcttgcttgggaggctgtaggcgggccaggctggggccagcctggagggtcttggctggctctgctggcaggtacagtagcagggtcagcaggagggagtccaggacggagctccttcatttttaattcagggaagcaaacttcagtggttgagtctgaggatgagcaggaaatgaatggaaaagtcttttttttttcttttttctttctaggcagggtctttctctgtcccccaggctggagtgcagtggcacaattatagctcactgcagcctcaacctgccaggctcaagggatcctcctgccttagcctcctaagtagctgggactacagttgtgcgccaccatgactggctaattcttaaaagaaatgttttcaggctaggcatggtgacccatgcctgtaatcccagtacttttggagccgaggtgggaggatcacttgagctcaggtgctccagaccagcctgggcaacatgacgagaccccgtcttgactaaaaatacaaaaagttagctgggcgtggtggtacagccctgtagttccagctacccgggaagctgaggctgcagtgagttgtgatcacgtcactgtcctccagcctgggcaaagggagtaaggccctgtttcaaaaaaaaaaattttttttttttttgaggtggagtcttgctctgttgcccaggctggagtgcagtggcatgatcttggctcactgcaatctctgcctcccaggttcaagtgattctcctgcctcagcctcccaagtagctgggattacaggcatgagccactgtgcctggactttttttttttttttttttttttgtagagatgggatttctctatgttgcccaggctggtcttgaactcttggcctcaagtgatcctcccactttggcctcccaaagtgttggaattacaggtgtgagccaccacacccagcaggaaaagtcactttttaaagcgagaggttgtgcgtcctctatagcttggcgctcatcagcatggaggatttactggaacgtgtgttaggtgaggggacatggaagatggcagcaaatccgagcccagagcatcagaaagcatgctttcagccaaagatgcgttctctccacctccgcgcagcacccttccccagtgtgtactcctggagcaaggtggggccgatcctacgaagaccctttcccgaaggcccctgctgcccacatcagtgtcacctggaccgcctgctcccttttctggatggctggaccagccccagggcctcctggcctggtgtggggagcacagtccaccctggggaatgcctggtatgtgtcccctccccactgggtaccaggggatgaagctgtgcttcgtggaaggggacagaggcgctggtgcccaggatggtgcacctggggcggctgaactggacctggctcctactgggcccctgtggagcccagattgttgtgagaaggggtggggaaaggcaggtgatccgcacctttcacttttgtttcacatgggaacaggggcttatcctgcacacatattcagtttggagtatgaatttccatgaagaggaaaatctctattaggctctgatgtcaggattgtccgtgagggccgggccgtgttctggggcaaggacaggagtggagggggcaaccagggaaggcttcctaatggaggaggcatttgatagcatcttgaaaaagaagcagttcctaggccaagccagagactgaagaatgaccacctaacttcttttttttttttttgagatggaatctcgcgctgtcgcccaggctggagtgcagtggcgtgatctaggctcactgcaacctccacctcccaggttcaagcaattctcctgcctcagccttctgaatagctgggattacaggcatgcgccaccatgcccagctaatttttgtatttttagtagagacggggtttcaccatgttggtcaggctggtctggaacccctgaccttgtgatccacctgcctcggcctcccaaagtgctgggattacaggcatgagccactgcacccggccacgaccacctaacttctttctacaagatgccccctggctgacgcaaagcaggttgagtgagtgtgacacttccttcctgtctgtgggttccggcctttccagagcccggccagtgctattggagacaaagtggccttcgctcttccttcccgccctgccaggcccagcctgtgccgctgagccccactttgcaattaagaggagctgtgaaccagtgatgctgatgtcgcagaaaagtggccaggggtctatggggggtgaaggacagggatgccgccctgagaactgtctggaaggggcttttgggtaacagtgcccactccagggtgtgggcaggctggggtggctgggagctgggctcataggctggcacaaccagagtttcccaaagccgtgggcctgagggccctgccttcctgggacagcaacctttggtccaatttgggaaaaggtgggttaaaccaagcccggctccctcactgtaggattactcagtgcgtttagtatgcaaatgtgcctctgaatctaagacaggaccacagaaacctcttcagtgttcctctggagggagggaccgcgggggatccaccgcaggggcctgggtctgcactggcctggtgaagtgcccccttagtgcttacaccatgcgcggtgagaggttggccctcgcctcccccaccctctgctggccttacctcaccacctctgcactcgcctcccagccggctcatgactaactcctgcctcttcagagccaatcggtgctgccaggttttccatttcaagtgatcccccgcctgggccaaaatgtttggattttcaggcacggaggggagatggacctcaggccaaaccatgctgggtaaaactgagggtcaaggctgtgctcagcaagtgctccagccctggccgtcaaacccatagtgtgcacagcgtgcaggaggtggctgggtgaatgaactcagtcatagcccggcccctcactcggggctgttcccaagttcccaccgccagccaggctgggtcagagcctcgtggggccttcctgggcttccctgccccacagcaggagttcgtatggagagtctcgagtgaggttaatgggttttcttcctcttctttttttttttttttaatttgagacagggtctcactctttttacccagccagggtgcagtagtgcaattatagctcacagcagcctcgaactcctggcttcaagcaatccttccgccgcagcctcccaaagtgctgagattacaggcacgtgccaccttgcccagctggggtttctgctttttactttttctcttgtttctaaactcaatacaaagaaagatattacatttataatcagaaaaaccaacaaggaatattatttcaaaattggaaaagggattaaagaaacaaaccaagaaacctctgcgattcctgcccatcggagtcagtggttgttagtggttggcttaacacaatgttttaggaagaaatagaataacagaaagcaactccagtgagctgagccctggctccgtctgtggcgctgcatcagtttcctgcagctgctgtaacgagtggccacaagctggctgggtcacaacaacgcccagccatcctctcacagctctgcaggccacacatccgagatcagggtcaccaggctgaaatcagggtgtccactgggcatagccctctggaggctctagggcaggggttcccagccccgtgtgtcctattaggaactggcctgcacagcaggaggtgagtgactggcaagcgagcgaagcttcatctgtatttacagtcactccccattgctcgcattactgcccaagctctgcctcctgtctgatcagccatggcattggattcttataggagagtgaaccgtattgtgaacggcacatgtgagggatctaggttgcgtgcttcttatgagaatctgatgcctgatgatctgtcaccgtctcccatcaccaccagatgggaccgtctggttgcaggaaaataagctcagggctccaactgattctacattatggtgagttgtataattatctcattatatattataataataatagaaataaagtgcacaatcaatacaacgtgcttgtggccgggtgcagtggctcacacctgtaatcccagagtgaaactctgtctcaaaaaataaaaaataaaggccaggcacagtggcttatgcctgtaatcccagcactttgggaggccaaggctggcggatcacgaggtcaggagttcaagatcagcctggccaatatggtgaaaccccgtttctactaaaaatacaaaaattagccggacacggtggcaggcgtctgtagtcccagcttcttgggaggctgaggcagaagaattgcttgaacccaggtggcggaggttgcagtgaactgagatagtgccactgtactccagcctgggtggcagagcgagactctgtctcaataaaataaaataaaataaaataataaatataatacacttgaatcatctcaaaaccatctccccactccctggtctgtggaaaaattgtcttccctgaaaccgatcccaggtgccaaaaaggttgggggccactgccttcatcgcctgcccctttgagcctctggtggctgtgggtgtcccttggcttgtggctgcatggcccttaccttcaacaccagcatctacagatctctccgggccccatctccacttggccatccctgtctgtgtcaaatctccctctgcccccgtcttgtatgagcaccgagactgcctttagggaccacctagaccatccagggtgctctcgccacagcaagatctgcaactgaatcacagatgcaaaaactcttgttccaaacaaggtcccatttgcaggtctagggattaggacatgctatccctggggccattattcagccttctctcgtgactatgatccctcccttcctccccagcctcccacctcggctgagatgctgtccccacctccctcactgtctggctgcctgtggggctgtcctccaggctctttgggaggaggtggttgcttgatgtctcccagaaggctgggaatggtcctccccaccccccaggaagatgtcctttctgccaaggagattgcatttggggtcctatcccaggcagagagcggacgggactgtggcctgaagtggcacttcagggcctttggctctgtcatctagccgagggctgtgcatgggcctcacctggtcacaggtaactcacctggctctgtggggcagggattgtaaactcagaggcctgcggggtgtgtcgaggtagaggggtgcaaatattgtaaatttgttgggggccttggggagcagcacagactgaaaagtgttttgtctgaagagcagaactgtcttataccagccctgtgcggccaggcaggaaggcttccgtggtgcggccacgcgtcctccctttctcaacagaagctgacagtctggagttttcagagagattgcctgagttctcagccttggcacaaacacacattctctttaaacaggcttgggccaacagaaccagcctccgtgtctcgggtttgaatgaacccttgaggtgaagcttaaagacagagaggatgcccctgattcccaccccagggacccacattgtaaacccccacctgctctgctgagcccttggcctcagcatggaccctgaccatgtgctggtggggaccccccaggtaagtaagcagcctctgaggaccccggatgaacagtggggaacagcactgatcccccagtggggccccgagttcccggagaggaagactcgctccctcccaggggacggctagagactcactgactcatgcgtgtgtggtaggaatcttccaggaagtccccgtcccgttcgccctctctgcctgggcggggacggcaactgcctctgtcactgcagactaatgggacggaggggggtgacttctcagggttcctcctgggcaggtgctccggaaccttttctcagcacgctggcctggggcacggccgttcctcctgcccagccacgttggggtacagggtgaagaagggctggggccagcccaggacagaggaaggcgaggcaggcacgcaggaactgggctttttaaacccttaagcccaaggaaatcgtagcatcgcgggacagggaaaatgaaagactttggaagtcgtcaggaatttgactctgtgagttggtttccaagagtctaagttaagcatctccaagtggatattaaaaaggagcagcaagcctcggggcggcgggggctggaggaggtggagagaggaggctgccggaagccgcactcgggacctctgcagccaccgaccagaccgggcggccgggactctgggactctcgcaggcagacccggtggtctgccggactcctcggggcccacttcgggccctctctcctgcctcctatttttggatttctctcctttgctccctttttcctcccgttttgaagagacaatgctacttcagtttggagcacaaacatatgatcagcacatggaaatgtggtaattcggatgcattcgtgattgcaacagattgaagaaattagaccagacaaagagtgtttttagaggaggaggaggaggaggaggaggctgagagagggagggcgacgggggtgagaaaggggaggccgcctctgagcgggacgccgggactcccgccgctgctaaatatatccgtaggaatggagagggaccggatctcaggtacgcagacagccccctccccatcggccgccccccactgccctggactcggggctttatttatgcctgggggaataagcatgcaaagggcgcttttgctcatttttcacagaaatatttcttttctttttgacggttccaagctcgtgggatgaactccgtctcagaagctaagctctcctgagtctggcttttatttaaactcggctctcctctctcctggctacttccctttcattttccagtgtgccattcttgcatgtcatggccactgtcaatgctgaggctgttggcgccgaaaccttgggagggtgtgggggacctgcccccctggctcgggtctggggcggcggcgcttggacctggctggtggttggtttgtccactgtgtggtttgttttttgcttccagccaaagtctgtcttcaaggctgcctcggtctcctacctaaaatagcatttctgtgccttcctggcagttgattatagagggggaagctcccggcgctcagaggagcctggcgtgtgtgtgcacgtgtgtgtgcatgtgtgtgcgtgtgtccattcacgctggcagcccccttgccgcaggcacagacccatcagggcgtgaacaggcaaatgaagagaaagggggctcccctgcctttagttcaccccagctttccaggccctccctcccaggcccagcctccttggtcccttcactcacatgcggtgccgtggctgccatctcacgtggccagcgccgtcatcggtaattagcagtgatgacagtttctgccgctcatgccgccctctgagcccagcgctgggagacatggggtggctgagccaagctccaggctttgggtattctgaagtgacctacgggccatggagcgggaggtcgctaagagtgtcaacccctacgtgccttgggccctggtctgttggttgccactatgtgtgtgttggggggtccctgagaggcctgagagagggaggcccatctcggtggctcctctctaggacgtgtggtcccctccaccactgctcccagggccacatctttttttttttttttctttgagacggagtctggctctgttgcccaggctggagtgcagtggcgcgatctcagctcactgcaagctccgcctccctagttcatgccattctcctgcctcagcctcccaagcagctgggactataggcgcccgccatatttttttgtatttttagtagagatggggtttcaccgtgtcaaccaggatggtctcgatctcctgatctcgtgatccgcccgcctcagcctcccaaagtgctgggattacaggcgtgagccacggcgcccggcctcagggccacatcttgattgtcacgttgggactggtggagcgggtgtgtgttgtgccgctgagcacacccagtcgggcacagcaggcggacctcaggagggggccaggggagacggcagaaggcttgggtggcagtgaaactgcatcttatctgtttgagctcgggggctcaggcccgctgggacgggtgggtgtggagcccagcgtcctgctctccgcccagcaggagccgcagggcagggagcgctgagagggaccttcgtcaggcttgcacagtggagccgtcctcggagtgaccaccccaccaggcagcctgggcagaccacagtgggtcccctgcctcctgggccaccagccccaggaggacgtcactccacccgcctggctggcaggggcctcggggagcctcgggttcggccttcactttatagatgatctagccgaggcccagatgggtgaccagcaggggatctgagagctgagcagagaggcgtgggtttgggggtggtgctccctggggagctggaagtgatggcaccctcccaggctcacaaaacacgggcttttcatgaactgaacaaaacactctttgaaagcagccagtgctgtgccccagagaccactctgatccctgctgcccttggctgaggacagcacagccagggatgaagcggggacctcccctcgggctgtgccttgatgaaagatgctttctacaaaatcccattcggatgtgttttcatgtaagaaaacgtacatttttagaaactcagttgtaaactggctgccttccgaatgaacacgacagtcccggagctgtttcccttaatgaggttctcgtcctgggcaaactttagcgctggtctttaattgtcactgaactcccgcacagtccctggggaagtgacttccttcctgtccctgctgggtggccttgagcaagccacttggcagctctgggccgcagttccgtcatctgcaaggtgaggggtgggagcggcacggcccctaggcagcgcccccacctcctgcgggtttctgcgcgtgtcctgagttttgtgggcgcctcttccctcactgaggggctcttcttctctgcagggcatggctcacgccgcgttgtcaggctgcaagccactgcgagagctgctctgatccccaagcatgctctggcctgaggaggagccatggggaggacgctgtgcctgtgtgacagaggcctgcccggcagatgccggcccgctgacttccagacgtggctgtgggtgcctcatgccccactgggctggcgtgtgaggcgtgtccagctcaggctgccctacagctgcccaggaagggtttgtgggagggggtggtcctaccctggtgagtccacggtggtctgccagccccagggaaggcttaggagccccaagacctgccctcttgtccctccctcggcagtgtctggctccggtctggtttgtgaacgggggcctgggtactctcccgccctccctgggggctgtggccttcccctgggaaggtgctggagggtttgtcagcagggccggcatgagtcatggagtggtgactggccgctgaggcatggaaggccactccttccagccaagggtcggagctttttttttgttctggaacggctttgtggcttttacaaattaagcagttttatcttgttccaagagcttgtatttcagcagggagagagtctccaagaagggaactttccactggggagctctgttgggctgggaggctaggaacaggccacgagggagggctgcaggcaggggaagtggccgtctgtgcatggtcatgaatgcaggcccggggtcctggagggggcttggccacgctgtcgctggacgtctgtccccaccagggtccatctgatgcagtacggcacagggtaaagcccagctcctcttacggggttcctgggtcatcagtgggcggggaaccgaggcctcctggagggcggtgcctcagccctcacccctccctcctgtccctcgctgtgctgtccccgatggcctctgccatcccctgggagttcttacccctggacgctcggtgcctgtccggtctcaacctctccagctctgcttttccatctccgaggtgagaggcctggcctgacgcgctctgcacccgcttcctgcccagccccgtgggaactctggtccctgtagtggtttcctggggctgccatcaccaagtgccacaaactgggtggctcaaaacaccagacatttcttctctcgccgttctggaggccagaagtccgaaatcacggcatcagcaggcctggttctttccggaggctccgagggggagcctgcttctcgcctctggcagcttctggcggctcccgaaacccttggcgttccttggctcgtggccacaccactcgacctctgcctccgttgtcacggggcctccttctgtgccctaaatctccccctgtctgtctctcatacggacagtctttctcggatttagggcccactgggtaacccaaaatggtcccatctcaagatccttaacttcataacgtctgcaaagaccctttttccaaataggccatgttcataggctctggggtggatgtaaattttaggggccacctttcatccccctgttgtccccgtgtgtctggatgcacagcatggttccatgtcccagactccttgctggacccctctggccctttggggtggcctttggccttttccactcgtttctgtgctcctggtgaggtgtcggggtcgggcttagcccctgcaggaattctggggacagcatggagccggcaactccccaccaggcgtcttcctacctgcccagagctcatggttgtgaggggtctctccttgtggttttgatttgcaattccccagtggttagtgatgttgagcatcttttcgtgtttattgctcatttgcacatattcttgcagaaatgtctgtccaagtcctttacctgtgtttgatttggatgattgttgttgctgagtgttaggagatctgtagattaatatccagatactaatcccatatctgacctatgatttgctgccattccatggattgccttctccccacgttgttagtgccctttgatatgcaatttttttttttttttttgagatggagtctgactctgttgcccaggctggagtgcagtggcatgatcttggctcactgcaacctccgcctccctggttccagcgattttcctgcctcagcctcctgagtagttgggattacaggcacccgccaccacacccagctaatttttgtatttttagtagagacggggtttcactgtgttgactaagttggtctcgaactcctgacctcaagtaatccacccgtctcggcctcccaaagtgccggagttacaggcgtgagtcaccgcacccaggctgatatgcaaatattttaaacttctatgacgttccactttatctatttgttcttctgttgcctgtgcttttggcgccatatccaagaaatcattgccaaatgcaacgtcaggaagcttttcccctgtgttttcttctaagagttttgtggttttagctcttgagtttaggtctttgatgcaagttgagttgatttttgcatgtggtgtaagggctggtccagcctcatgctctgggctcttgattcacttctcttcttttctcacgcccagctggttccgctgggtggcggggaggagtggggaagtcccgggctgggcctgcactcgatcatcccctctcaggccagccagggagtctcagctcctgcccaggacctggctggacgtgctccctaccgggaaagcctgggccgtctttctaggctgatggcagggccagcccggggcgtcctgaggcctgccctgcggacatgccccttgttctaggtggtgtggctgcccggcctgcgtgtgagaccagctgtctgtgcttcaggccatggaggctgagtgtttccagcctgtccccttgctcggctctccctctggggaagcccctgcagcccattctctgcctccgcttctgccatctgtgcctttgtctgcttcctgtttggaggtggtcatccctggggccacccctcatgatctggacacaagtctccatcctgaagccaccacccaaacccctgtgcctcaaacccctcccacccaccacatgggtttccactgtgaccaactcagcagctgatgaagcttcccttggggctctcctagcaacggggagctggctttcccggaggcctggcctctccctaagtggaagtggggcgtgagggtgtcagcctttttctgctgcctggtgctctaggttggcttgtcacccctggaagcacttgccatccttatacagcaccccacacccacctccccgcctcctaccccttcttccaaggggtcatctctgcttccctccccacccaacctcacccatgtggtccgcccagcaacctttgacccccaacatgacaaaataaacctcccttgccggtcactcattcattcattcagcattgggtgctccctgtggacttggcgctggggtcccgtggaggacaaagccagacacagtccttgccctcatgggactgcacaagtgcaagaccacatcagtaaacgtgaaacacaggaagtgacaggtgtgacaaaggggaccagtggcaggacagaacctgcggttcgtaggaccaggtcaggagggctgcctcggggggacaccttcgggctgagcgcagaaggatgaggggagtaaaccaggctcaaacccagcaggcagaggcgatcgctgcaggcaaccggcaatgtgttcaaaggccctggggcgcggggggctgaggccggcagcacggcaggaagtaagactggggttgaaagagactgactgtcatgttgtgaaatatacacttggttttcatctccatttcctggcacacaactcctaaaatccttggaatctccaaagtgatgtctttttggatgctcatgattgacagaccagctggcagcttcaggatggttcccagggaagaccaggtagaatcacaaggttcagcaccaccccgcaacctccaggtaggggagaggggctgaaggttaagcagatcatcagcggccaatgattgaatcaatcatgccttcgtaatgaggcctccgtgaacactcagaaggatggggttccgggagcttctggatggatgagcatgtggaggctcctggagggtggagcgcctggggagcacatggaagctctgcgtccctcccccataccttgccctacacatctcttcccctgtatcctttgtaatatcctttataataaactagtaaattccatgagccccaggaacatgtgtaaaagaaaaaaaaaagaataaaccatagctgctgtagcaagttaatcctaccagcactggctctcatctgccgaccttacctctggcaatgcctccctctcctgggctcctgggacccctccggccccaccacccctcctgtagtggtctcgctggctgctgccctcaggttagtttatttttacccggcctgctcccaccaggggctgaggcctccttgctcactccagcttcctggcccgtctcttgctctgggcacccccccactccgaacggccagagcttctgaagccgctcgctgtgtgcccccgcctggccccatgcatcccgcacggtgctccccagggtctcccactggcaagggcattggcatagattctggggctgccttggttcaagcccaccctgacttggagcctgagggtccctgagggggtcctgaaggccagggcaggcaaggctggcatgctctgggcagtgggggctgggtatgggaggggatcgtgggtggggagattcctcttaaccagcggcccacgtttggagactgatttgggctccaggctacgccttgaaattgggacagagagtggcgcagatctcagcccggagactccctctgcctgtggacgccctcatacctccatccgtggagccaccctcctctttttttttctaaatggggaaactctgacttgaacactgaataaacaacacaccctcgaaatcagcgaagaggcactggctctgaaactttgccatgaaagcttgaaaatgctctttggaccgatttgctggaacagacgggtgtgatggggctgcggggtttcaggtggcaggaggcgtccccgtgcctagggcatcccgatgctcagagtttccccgtgcccagtgtgtccctgtatccagggcatccccatgcccagggtgtccccgtgcctagtgtgtccctgtatccagggcatccccatgcccagggtttccccgtgcccagggtgtccctgtatccagagcatccccatgcccagggtgtccccgtacccagggtgtccccgttcccagggcgtcctgtgcccagggtgtccccgtgcccagtgtgtccctgtatccagggcgtccccatgcccagggtgtccccatgcccaggcactgcctctccccactttcctaatctccctccaccaacaggtgtcagctgtgaaatgcctgctgtgtgtgtcctttggttgagttcatcttgtgctcttaagttcctgttagacacaggcaggctgctttagttcttctggcaaatgttttgttgttgttgtttgatacggggtctcactccgtcacccaggctggagtgcagtggcgccatctcgcctcactgcaacctccgcctcccaggttcaagcgattctcctgcctcagcctcccaaatagctgggatgacaggcgtccgccaccatgcctggttaatttttgtatttttagtagagatggggtttcaccatgttggtcaggctggtcccgatctcctgacctcaagtgatccacccagcttggcctcccaaagtgctgggattacaggcatgagccaccgtgcctggcccgtctggtgaatgtttattgaggcctactatgtgcagcccctctcttaggtgcttggcctgtaatgaggagcaacaaagacacagtcgctggtcgcttgttacttaacagttggaactgagaggcagtccacaaatgagcaaatccataggtggttttagatgaggactgtgaagaagctaagaacaggttgctgggggtgcatatctgtgtgtgtggcgaggggattaatggaagccctttctgagtggtgacactgagctgaagctgtaatgaccagaaggacccagccaggccaaaatccaagggaagagcaacctggcaaaggaaacagcaggtgtgaaggcccgaggctggagcctggggaaggtgggagtggctggagtgtgttttcagagacgggccatggtgacaccaatgcgacaggcagggccaggtcgtgccgggccttggaggccctggtgagggcttgattttattctcactatggtgggacctcagtgccctgtggctgctgagaatggccaggggcaggcagggaggcctgctagggaggaggctgctgcaggccctgcagctggagagggaggatcaggatctctttagagaggaagttggagagggaggatctctttgattgctggatggacccacctgcctggctgcccccgtcagcatccagcagaggccactggatgctgacaggtggccggccctgcccagccttgcactgccctgtgctgccctggtggctgccggctttaggaggagcgcttttggtgtctgagcccagtggtcctggctgtggtttggtacacttggccgtgggtgaggccaaggtggtttggatcctgggaaggttgggtacctggcagcctcaaggcaggagctggggtgttggaggaggaagcacgctcatccctcgttccttcctgtttcgtgggatgctgagtctctgggcagggacatggtgagccctggtgtgatgcacttaacacctgctggtgcccccatccccaagcaggaaccctggtgcctggtgcctgaggactgctgtccaccgtcccaccatccttcaggtttcttcccagcctctgactcggggcaaggttcagatatccagaacattcttggctggctcttggagctggggtgaggcagaacctccctcccatatttacagcaccagccaaggcttcggggtttggacaccatccctgggaggggtgagcaggacaagtgaggtctccagacttggggtggcttcggactggccaggcaggtgggtgggggctgcagtccatgcccccgctccaggcaacacagtcgagctgcagcccccgctccatccccagctggggctccctgtgctcaccttctgcttccttcctctccctcggaatggggggtggacactccaagactagcctcccagccactctccctgcctcctgcctcctctccttcgggacagacccctgtgatcgctgggtgttcctgatgctctgtcccctctgcgtcctgtgccgtgggtgagagagggcttcggggggacttccccctcttggagcacctgctgctccgggtgcctctgggggcgggcccccacctcacattgtggagctggtgtaggaaggaaggtgccgggagccagctccaattcacgtgctggctgtggccctcaaggtgtggatggcaggaggtggtgagacagggactcattgatcatgggactgacaccccctcatgttgatgtgggccctgagccataatctcaccagctcctgagttttggcgctgctcttggcgatggcgtggactcagccaggctctcgggcagcctttcctggattcttcctccgttctcccctgggcagtgtttctgttcacctggaaaggatgggtaggacttggagacaacagggattcaaagaagtcgggagtgggggcacctgtgcagctcaccctgcagaacagacaatttggttaaagcctaaagcctgctgtcaggagcctcgcttgcctctcagagagcacatggcttgaccatcacggggactgggggagaggcacaggcatgcctgtccggcagcagaagggaaccccgggcctgggcctctccattctgtggcgttgtctttcctcagagttgcactgtctccttcactgtccctgcctggccccagtgctcatgtggcttgtggccctcagtctgggcttggtctcccgcaattcaccctgcccagccccacacagcttgtccctccagctgggaatcggagctcacctggagtcccaggcagcagattcgatgcagtgatgcagggctgtcagccatgccagcaggccctgctgctcacagagggatgggtattgctgttgacaataattaaagaactacggcttcaggctgggtacagtggctcacacctgcaatcccagaactttgggaggccgaggcaggagaatcaattgaatccaggagttccagaccaggctgggcaacatagcaaggctttgtctttacaaaaaataaaaaataataataataataaaaactacagcttcagaatgattgacttcagcatgtttataaagtcaagggtcttcagtgtcctgggcctatgtcactgcgtcagagggagagaggaagaggctggggtgatgggcactggggcttatgctcctcctggaatgggtggtcttggactgtgcctgtgtgatatgtttgtcgagcgggggcggtgtccactgaggactggatgttgaggtgtgggtggggggaggttatgaagcactgggcatttcccgtgcaccagtgccccgagattgcagagaggggacccgcccagcctgggcagggaggcgggtggcagcgaggaaggggagaggaactcgggtgcagaaagcctttcctccagcaggtggcgccgcaagctctcgagagtccagctcctgcggggtttgcattttcactgaatttgtgggcagaggctgcctgggtgtagtttccgccaactgtgactgctcactgcgggcgaggggaagtggagtgcagagaatgcaccggagggcagatgaccagcccccgcacaggcacgggggtgcctccttccccgcacaggcacggggggcccgagcccttggggttcctgtcctaactgggcggggaaagggagggttggaagctgagttagggggaaagggggtggtctcctgccatctcttttattttatttttcctatttttggttgataggtttcaatcttttttacatttttccaactttttgccgtaaaacttttcaaacatagaaaagatgaaagagggctgagtgtggtggctcatgactgtaatcccagcactttgggaggttgaggtaggaggatcacttgagcccaggagttcaagaccagcccgggcaatatagtgagatcccatctctataaaggatacaaaaaattagtcaggcatggtggtgcaggcttggagtcccagctactcggaaggttgaggtgagaggattgcttgaacctgggaggttgaggctgcagtgagctgggattgtgccaatgcactccagcctgggcgacagaacaaaaccctgtctcaaaaacaaaacaaaacaaaaccacaaaaaagaaaccatgaaagattctaaagtaaacacccatgcacctaccacctagattccacagcaaccattttgctgtttgcttcaccacaaatccctctggccaccagcatccacgctggttttgatgcacttaaaataagctgcagaaatcagcacacaacatcctgtcaacacctcagtttgcatttcattaactagagtccggcatttgtctgtgattatttttgtttttctttgaagtaaaatgtatataccctgagatgcacaggtgtgaaacgttccgttctttgaattttaacaaaggtatccacgtgtatcccagcctgaccagaacatagaacatcactatcaccccagtaagttcctcatgcccctccaggtgcatcacagtccccaccttccccagggcaaccacaattgtgctttttttccaccacgaaataattttgccagtttgagtgtttcttagagctacccatgttgctgcaggtgccagcgatttgttctgttttattgctgagtaacgtccactgtgtgaacattctgtgggtttttagtcattctcttgttgaaagacccctggctgtttccatctggaggctcttatgagtaaacctgttacgctggttcttcttgtacaagtttttctgtgcatatgggcgttcatttattctgtagaaacacctagagtaggtatagggtaggtatacatttagttttataagaaactgccagatcttttcccaaagtggcccttccatttcacactcccaccagcaatggatacgagttctagttgctccacatcctggccaacatttggtgctgtcactctgtgaaatcttagtcattctggtgggcgtgtagtggtatcatctcattatggctttaatttgctttggcctgatgactaatgcggttgagcacattttcatgattggctcttcatatatttttcctttgtgaaatgtcttttcaaatctgttgctcattttaaaattgggttgcttgactttttcttctggatactgatcttttgtcagatacgtgttttacaaatattttattccagtctgtggcttgcctgttcattttctttcctttttcaagaacaaggtctcgctgtattgcccaagcaggtctgaaactcctgggctcaagctgtcctcctgcctctgcctccccaagagccggttttacaggcatgagccaccatgcccggcctgttcattttcttagtggtattttccaataagcaaaagtgtgtcactttaatttttatgaagtctaatttaacaaactcctttctttgtggttctctctctgtgttctttgtaagaaacctttgcctaccctgccaaattgcaaagatatttatgttttcctttagaaggcttagagttatatagcttttatgaattaacttttgcatatggtgtgaggtagagggtcagggttcattttgttgtcgttttatgtgtttattcagttgttccaaacttcatttttttttaaagcttttattttgtattttcttggtgacttatgaggtcgcacaattttccaagatccttgttggtcatttacgtattttcctttgtaaaattatctgtccacgtcttacttctttttaaaattatgttgtttcaagatcgagtgatttctgaagccttcattttataatgcttgaaagaatgaacaccttgttccccagctacaggcttctgctctttgtcctgcagctgcacagtggggtaagacttgggttttgttttgttgctgctttgttgtttcttcatttgactgtttccccatgggtctcatttaaaaaaaaaattggccgggcacagtggctcacgcctgtaatcccagcactttgggaggccgaggcgggcagatcacgaggtcaggagatcaagaccatcctggctaacacggtgaaaccccatctctactaaaaatacaaaaaattagccgggcgtggtggcgggcgcctgtagtcccagataatcgggaggccgaggcaggaaaatggtgtgaacctgggaggcggagcttgcagtgagccgagattgcaccactgcactccagcctaggtgacagagcaagactctgtctcaaaaaaaaaaaaaaaaaaaaatgttgtttcatatgttttttatatattctggatataagtcctttatcagatatatgtatcataagtttttttttccacattgctcctttccttttggttttcttaatgatgttatttaatgagcaagagtattttgttttcataaagtccaatttatcaactttttccagtttcgatttatgatttttgtgacctatggaggaaatctttgcctacactaaggtcaaaagaagttctcttattttctagaaattttatagttgtatattctatgattccttttattttttaattttttaaatttttacattttttaacctattatagccgtcaggatgttgtatgatccattttaaatcagtttttgtatttggtttgaggtcagggttaattcttgtttttctatactcatatccagttctagcaccgtttgttgaaaagacataccttactctattgaattacctgacacctttgctaaaaatcattgactgtatatgtggccctatattagtatatgtacgtatatacatgtaggccctgtgttgactgtatgtgtggtcctatattagtatatgtacgtatatacatattggccctatgttgactgtatatgtggtcctgtattagtatatacatatcagccctatattgactgtatatgtggtcctgtattagtatatgtacatatatacatgtaggccctatgttgactgtatatgtggtcctatattagtatatgtacatttatacatgtaggccctgtgttgactgtatatgtggtcctgtattagtatatgtacatatatacatataggccccgtgttgactgtatatgtggtcctgtattagtatatgtacatatatacatgtaggccccatgttgactgtatatgtggtcctgtattagtatatgtacatatatacatataggccccgtgttgactgtatatgtggtcctgtattagtatatgtacatatatacatgtaggccccatgttgactgtatatgtggtcttgtattagtatatgtacatatatacatgtaggccctatgttgactgtatatgtagtcctatattagtatatgtacatatatacatgtaggccctatgttgactgtatatgtagtcctatattagtatatgtacatatatacatgtaggccccatgttgactgtatatgtggtcctgtattagtatatgtacatatatacatgtaggccctatgttgactgtatatgtggtcctgtattagtatatgtacatatatacatgtaggccctatgttgactgtatatgtggtcctgtattagtatatgtacatatatacatgtaggccctatgttgactgtatatgtggtcctgtattagtatatgtacatatatacatgtaggccctatgttgactgtatatatatatgtggtcctgtattagtatatgtacatatatacatgtaggccccgtgttgactgtatatgtggtcctgtattagtatatgtacatatatacatgtaggtcctatgttgactgtatatgtggtcctatattagtatatgtactgtatacatgtaggtcctatgttgactgtatatgtggtcctatattagtatatgtactgtatacatgtaggccctgtgttgagacactattgtgttttcttgatattttgtccattcctttgctgatgccacatcttgattaatgtggctttacagtaagtcttaatataaagtctctcaaatatctaaaatattactttgaatattctaggtcctttgagtttccttataaatttaagaagtagcttgttgatgtctacaaaaatgcagtgtgaattttggttgagattgtgttgaatctgtagatcaattaaggaagaattggcattttaacaatattgagtcttttgtatagatggtatatctccgttttaaaggtccttttgtatttcttttatttctctactgaaaaaaaatctctacagaattacattgttttgtagttttcaagaaaaagatcttgcatgccatttgttaaatttattcctaagaattttacttttggcactattttaagctgaaatagattttaaatttcatttttaattatttgctgctagtatgtaaaaatacaatagatttttgtatgtaaatcttatatcctatgatcttttccaaagtcatttattactctggtaatggttttgtaggtcttttaggatttaaatacatagttttacttctttctgatcttgatgccttgtttttttttcttgctttattgcactggttagagctgccagttcagtattgaatagtagtgattagtggacatccttgcctgtgccaaacttataatgttaactttagatttgtcatatatgacctttgtcagattgaggaaattcccttctattcttaatttgctgaaattttttaacatgaatgggtatgattttagtaaatgctttttctgcatctatggaaatgatcattgttttgtcttttattcgtttaataggataaattacaatgattgatttttgccccccgttttttttttttttttttttaaagaaacagagtctcactcttgcccaggctgtagcacagtggtgccatcgtagctcactgcagcctgaactcctggacttaagcaatcctcccacctcagcctcctaagtagcagggactataggcacatgccaccatgccaagctaatttttaatttttaaaattttttgtacagatggggtctcattgtgttgctcaggctggtctgcaattcttgagcttaagcaatactcccacctctgcctcccaaagtgctgagattacaggtgtgagccactgtgcaggcctgattttttaatattgaaccaaccttgcatttctggaagaagtccaacttgcttatgagatatcatcctttttatatattgctaaatttgatttgcccagtttttaaggatttttgcgtgttgattcatgagggatattggtgtggtattttctttgtttgttagtttgtttcggtaatgtctttgtcagcctcattttggcttcataaaattagtttggaagtgttcccttctctttgttttctgtgttttcataaggttgatgttgtttcttccttaaatgtttgatagaatccaccaagaaaaccgtctggacctagaattttctactaggaaaggtgattgtttgtttttaatcacaaattcaatttaatgtatagaaagagttattcaggtttttttacttccccttgtcttacttttggtaagttgtactttgaaggaatttgtccctttcaggtaagttgttgaatttactcatttaaagttgttcgtaatacaagcatacctagggtttgcttccagacctcggcaataaagcaaatattgcaataaagcacgtcacacaaactttttggtttcccagtacatataaaagttatgtttaggccaggcatggtggctcatgcctgtaatcctagccctttgggaggccaaggtgggcggatcatttgaggttaggagtttgagaacagcctggccaacatggtgaaacctcatctctattagaaatacaaaaattagctgggtgtggtggcacatgcctgtagtcccagctgcttgggaggctgaggtgggagaattgctcgaacctgggaggtggaggttgcggtgagctgagatcacaccactgtactccagactgggtgacagggcgagactccatctcaaaaaaaaaagaaaaaagttatgtttacactatactatagtctattaaagtgtataagatcattatgtctttttgctaaaaaatgctaataatcatctgagccttcagcaagccataatctttttcttggtagaaggtctgcctcaatgttgatggctgctgaccaggtggtggttgctgaaagttgaaggtagctgtggcagcagtttctttgtttcttttttctttttctttttttttgagacagagtcttgctctattgcccaggctggagtgcagtggcacgatttcagctcactgcaacctctgcctcccgggttcaagcaattctcctgcctcagcctcccgagtagctgggactacaggtgcctgccaccacgcctggctaatttttgtatttttagtagagacagggtttcaccttgttggccaggctggtctcaaactcctgacctcaggtgatccacctgccttggcctcccaaagtgctgggattacaggcgtgagccactgcacctggccggcagtttcttaactgaagtttttgacatgggttgactctttctttcatgaaagatttttctgtggcacgcattatgtttgatagcatcttacccacaatagagcttccttcaaaattagagtcaattctttcaaccctggccacggattgatcaaataagttgatgtaatattctaaatcttttgttgtcatttcaacaatgttcacagcatcttcgcctggagtagatcccatctccaggaaccactttgtctgctcatccataagaagcaactcctcatctgttcaagtttgatcatgggattgcagcaatccagtcccatctccaggctccacttctaattctagttctctgctatttccaccacatctgcagtgacttcctctgctgaagtcttaaaccgctcatccatgagggttggaatcaacttcttccaaactcctgttaatgttgatatttcaacctcttcttgtgaatcacaagtgttcttaatggcatctagaatggggaatcctttccagaaggttttcaatttactttgcccagatccattagaggaatcactaactatggcagatactgctttataaaatatatttcttaaataataagacttgaaaatcaaatttatcccttctccatgggctgcagaatgggtgttacattagcaggcatgaaaacaacattcatctttacatacatctccgtcagagctcttgggtcacaaggtgcattgtcaatgagcaataatattttgaaaggattcttttttcctgagcagtaggtctcaatgatttttttttttttttgatggagtctcgctgtgtcacccagaatggaatgcggtggcatgatctcggctcattgtaacctctgcctcccgggttcaagtgattcttgtgcctcagcctcctgagtagttgggattacaggcacacaccaccatgcttggctagtttttgtattttttgtagaaacagggtttcaccatgttggccaggctggtctcgaactcctgacctcaggtgatccacctgcctcagcctctcaaagcattgggactacaggcatgagccactgcaccgggccctatttgttttttttttgttgttgttttttaattgagacagagtctcgctttgttgcctagactggagtgcagcagcgctatctcagctcaccgcagcctccgcctcccaggttcaagtgattctcctgcctcagcctcctgagtagctgggactgcaggtgtgcactaccatgcctggctaatttttgtatttttaatagagatgaggtttcaccaccatgttggccaggctggtcttgaactcctgaactcaggtgatttgcctgccttggcctcccaaaatgctgggattacagctgtgagccaccgtgcttggcccttttttgtttttttgttttttttcaaattgagacagagtctccctctgttgcccaggctggagtacagtggcacgatctcggctcactgcaacctccgcctcctgggctcaagcggttctcctgcctcagcctcccaagtagctggaattacaggcgtgtgacaccatgcctgaataatttttgtatttttagtagagatgcggtttcaccatgttggccaggctggtctcgaactcctgacctcaagtgatccccccgccccagccttcaaaagtgctgggattacaggcgtgagttgccgcaccaggcctcaatgggtttttaatattcagtaaaccatgctgtaaacagatgtgctgtcaagtagggcctgttattccatttctgaagcatagacagaatagatttggcagaattcttaagggccctaggatttttggaacggtcaatgagtattggctttaacttacggtcaacagctgcgttagcctctcatgagagtcagcctgtcctttgaagctttaaagacaggcattgacttctcccctctagctatgaaaatcctagatgacatcttcttccagtagaaggtgggacatctatgctgaaattctgttgcttagtgtagccaccttcatcagtgctctgagctagatcttctgggtaacttgctgccgcttctccatcagcacctgctgcttcaccttgcacttttacattatagagatggcttctttccttaaacttcatgacctgacctctgctagcctcaaactttccttctccagcttcctcacttctcttagccttcataccattgaagagagttagggctttgccctggattaggcttttgtttaagggaatgttgtggctgatttgatcttctatccagaccactcaaactttcttcatatcagcattaaggctgttttgctttcttcttcttcatgtgtgcactggaatcgcacttttaatttctttcaataactttttcttggcattcacaacttggctagctatttggcataagagatctcacttttgcctgtcttggctttcgacacgccttcctcactcagcttaatcatttctagcttttgatttaaagtgagagacgggtgactcttcctttcacttgaacacttagaggccattgtagggttattaattggcctaatttcaatattgttgagtctcagggaatagggatgcctgagcagagggagagagagcggggaacagccagtcagtggagcagtcagaacatacaacgtttattgaataagttcactgtcttatctggatgtggctcgtcatgccccaaaaacaactgcaataatggcattgaagatcactgatcactgggcgcggtggcccatgcctgtaatcccagcactttgggaggccgaggcaggtggatcacctgaggtcaggagtttgagaccagcctggccaacatggtgaaacctcgtctctactaaaaataccaaaattagccaggcgtggtggcgggtgcctgtagtcccagctactggggaagctggggcagaagagtcgcttgaacctgggaggtggaggttgcagtgagccgagatcacaccactgcactccactgcactccagcctgggcaacagagcgagactccatctcaaaaaaaaaaaaaaagggccgggcgcagtggctcacgcctgtaatcccagcactttgggaggccgaggcgggcagatcatgaggtcaggggattgagaccatcctggctaacacgatgaaaccccgtctctactaaagatacgaaaaaaatagccgggcgtggtggtgggtgcctgtagtcccagctactcgggaggctgaggcaggagaatggcgtgaacccgggaggcggagcttgcagtgagccgagatcgcgccgctgcactccagacagagcaagactctgtctcaaaaaaaaaaaaacaaagaaagaaaaaagaaaaaagagatcacagatcaccatagcagatataataataatgaaaaagtttgaactatttcaagaatcatcaaactcctacacagagacacagtgttaacatgttgttggaaaaatggtgccagcagacttacttgatgcagggctgccacgaaccttcaatttgtaaaaagtgcagtatctgtgaagcacaatgaaatgaggtgtgcctgtgttccttgtcactgtaatgtcggtaggatccgtaaggaaaacacttcattccttttattgtgactttatgttcgccatctccctctcatcagcagcctggctaggaggttatcaatctagatctttttaaagaaccagcattggactccccttttctggtgtccatttccttgagtttctctgttatcttcattacttccttccttgtacttgcttcagcgcattagtcagggcccagtcaggaaacaaaaaccacaccggcaatttgaatagcaacttgtaatataaagtgttcttaactgtaagaggtagttaactattaaagggatcacaaaggggtgacattgtgatataagaaagatgtatttgggctgggctcggtgcagtggctcatgtttgtaatcccagcactttgggaggctgaggcaggcggatcccttgagctcaggagtttgagaccagcctgggcaacatggtgaaacctcatgtctaccaaaaatacaaaaaattatcctggcgtggcggtgtgtgcctgcggttccagctacttgggaggttgaggtgagaggatagtttgagcccgggaaggcagacgttgtggtgagccgagattgcactactgcactccagcctggatgacagagggagactctgtctcaaaaatcaatgtatctgtctgtctgtctgtctatctatctatctatctatctatctatctatctatctagtctctgtcccccaactttgtttggcatgtagctcctaaaactcttgaaatctccaaagtgatgggtgtctttttgtttgctaaggaggcgactggtggctggaggctcctggacagcctggggataagggctggttgccaggggacccagccttgtgattagaaggctagaacttgcagcctttcccatccacctcctgcgaggcaagaggggatgaaggttgagttgatcatcaatggccaaagatttcatgtcatgcttatgtagtgaagcctccctgaaaacccaaaaggatgaggtttgtagagtttcaggttgttgaatacctgcaggtgctgggagggcagtgtaccctcccgtggaagctccatgccgcttccttcatacctttcttatgcatctcttccagttggctgttcatttgtatcctttgaaatatcatttgtaataagtcagcaattttaagtaaactgatttcctgggttctgtgagtcactcaagcaaattattgaacctgagaagggagttgtgaagacctcaaatttgtagccaagtcagacagaagttatgggtaacctggtgtcttaccacttgcgactgatctctgaagttgagggcagtcttgtgagatggaacccttaacctatgggatctgcactaactctggttggtgtcagaattgaactgaattgcaggacacccagttggggactgctgagtattggagaattgcttgggggtcggcgggaggaaaccacacatctggtgtcagagctgaagcactgagtgttgtgaatgagagtggagagatagagtttgttttgccttatgcaagaggactctaaggagtatagaaagagcaaatatgagaagcagctactttagaagaaaacataggaggaaagcttcgtgacattggagttggcaatgctttcttggatgtgacaccgaaaatacaacaaaagaaataaatgataaattggacttcaccaaaacttaaaacttttgtgcatcaaggaatactaccaatggcgtgaaaaggaaatccacagaatggaagaaagtatttgaaaatcgtatatccgataaaggactagtatccagaatatataaagaactcctacaactaagccacaaaacaaaaaaaaacaacccagtgaacagacatttttccacagaagacataccaatggccaagaagcacaggaagagatgcgcagtgtcactaatcatcagggaaatgaaaatcaaagccacaataaaatatgatttcacaccctttaaggtggctgttagccaaaacatggataacagcaagtgttggcaaggatatggagaaattggagccccgtgcactgctggtgggaatgtaaaatggtgcagctgctgtggaaaagatataacaattgctcaaaaaattaaactcagaatgaccataacatccagtgattccacttctagatgtatactccaaagaactgacagcagggacttgaacaggtgtgctacattcttgtttgtagcagcacttttcccataaccaaaagatgcaggcaacccaggtgtccaccagcggatgaatgaacagacaaaatgtggtccatctgtacagtggaatattattctgccttaaaaaggaaggagaggccaggtgtggtggctcacgcctgtaatcccagcgctttggaaggccgaggtgggcagatcacttgaggtcaggagtttgagactagcctggccagcatggcgaaaccctgtctctgctaaaaatacaaaaattagccaggcatgggggcatgtgcctgtaatcccagctactagggaggctgaggcaggagaatcgcttgaactagggaggtggaggttgcagtgagccgagaccatgccactgcactccagcttgggcgacagagcaagactgcctcaaaaaaaaaaaaaaaaaaaaaaaaaaaggagattctgacacatgctatagcatagatgagccttgaagacatgctaagtgacagaagccagacatgaaaagacaaatactgtatgatttcacttttatgaggtccctagagtagtcaaattcagagagacagaaagtgggatggaggttgccagaggctgggggaagggagaatgaatgggaagttggtgtttaatggggatagaattgcagtttgggaagatgagatggatggtggtgatggttacacaacagtgtgaatgtgcttcatgccaccaaactgcacacctgaaaatggttaaaatggtaaattttctgtgatggatactttaaggcatgtatgcaaacacacagaagcagttactaccactggggttgatggaaaagaaaccaagaactcggagcgtcctccacaccttgccacgtcttacgttcaggccttgttggagagtgtgtgactgccacagaaacctgcagcctactggtaacaaaaaggttcttgccagaaggtgtagaaagagtggatctgcaggatcagcttactgggtagccgagaaacctactagagggtatgggtgggcaggagctgggtgtctgagaagtttgctgaggtcccattgggctagagctggggtgctggagaaactcagtacagagcaggccccactgggcacacgccactggcagctgtgccttcagaggaaaaagagaccctggaaccaggaagagaagctgctacctcagcaaggcctggcagctccccacagtgttgtcccctgtggatagagcctgacatgactgtatttggccaaggagaaagactcataaggcctcggtccagtatcacggagcggggcctggcaggatgtatgcagagttaagaggcaatacatgggtaactggcatatttttccagattctttgttttttttgttgttttgttttgttttgttttgttttgttttgttttgagagagcatcctgctctgttgcccaggctggagtgcagtggcatgatctaggctcactgcaacctccacctcccgggttcaagccattctcctgcctcagccttctaagtagctggagatgcccaccatgcccagctaatttttgtatttttagtagagacagggtttcaccatgttggccaggctggtcttgaactcctgatctcaggtgatccacctgccttggcctcccaaagtgctgggattacaggcgtgagctacactgcacctggcccatttttccagattcttaaagcagatccttaggtctttttttttttttttttttttttttttttacttcttttctaatataagcacttacagtttccctctaagcactagcttcagcctacgtattttagtatgctgtgttttcattatcatttcatttgaaatattgtaaaatttttcttgtgatttcctctttgactcatgggttatttagaagtatgttgtttaatttgcaaatagtcaaggctcctctgagtatcttagagctattgatttctaatttaatcttactttggccagacaagcatattttgcatgcttttaaaatttgagacttatggcccagaatgtgtatcttggtgaatgcactgttttcacttgagaaaaaaatatgtatatatattctagacttcctgagtatagagctttataactgctgattaggtcaattgctagttaccagtgttcttcagattatctgatgcttgtttctcagatgttgagagaatggtgtttgctatggcctacctgtttgtgtcccccaaaattcatatgttggagcttaatctctggtgcagtggtgttgggaattggggcatcagggaagtattggctcatgagggcagagtcatcgtgaatgggattagtcccttctgccatgtggggacacagcaggaaaaggacatctctgaagcagggagctagctctcaccagacactgagcaccctgattttggacttcccagcctctagaactgtgagcactacaatctgtttataaattacccagcctaaggcattttgttttaacatcctgaatgaactgaggtggtgttaaaatctccaactatgcatccaggcgcagtggctcacacctgtaatcccagcacttcaggaggccaaggcgggtggatcacctgaggtcaggagtttgagaccagcctggacaacatggtgaaaccttgtctctactaaaaatacaaaaattagctgggcgtggtggcaggctcctgtaatcccagctactcgggaggctgaggcaggagaatcgcttgaacccaggaggtggaggttgcagtgagccgagattgcaccattgtactccagcctgggcaacaagagtgaaactccgtctcaaaaaaaaaaaaaaagagtctccacctatgattgtggaattgcccatttctccctttaattctttcaggttttatatcatgtattttgaagctcctttggttaggtgcatacacatttatgattataatggtgtctcgatgaactgatcatttaaccatgatgaatgtattcctttatctcgtaataattttatcttggactcaactttattgatatttatgtagcctctccagccttcttaaacatgctgtttgggatgcataagaaggctggagaggcttatggagaaacttatgatggtttgacttacagtttttcaactttaccatggtgcgaacgtggtatgtatacagtagaaactgtactttaagtatgtgtgaaaccattgtgtttctcactttcagtacagtattcaataacttacatgagatagtcaacactttattataaaataggctttgtgtttgttgattttgctcaactgtaggctgaagtaagtgttctaatcatgttaaggtaggctaggctaagctagaatgttcggtaagttagatgtattaagtgcatttttgagatgatatttattttccacttatgatgggtttgtcaagacataactccatcatcattcaagcagcatcagtatgtctttttccaaacagaaaatttcaacctgtgtttatactgaaacagcatcttttgtagatagtatatagttgagtcttgctattttattcattctgacagcctccgccttttaattggaatattcaggctatttctgtttaacatagttatagatatgactgggtttagagctactaccttgctctttgatatttatttctttcatcttgctttcttggcttcttttatgttaattaagtattttttagaattctattttaatttatgttttttttttttttttttttttaagacagagtctcactctgttgcccaggctggagtgcaatagcatgatcttggctcactgcaacctctgcctcctgggttcaagtgattctcctgcctcagcttccctagtatactgggattacagacgcctgccaccacggccggctaatttttgtatttttagtaaagacggggtttcaccatgctggccaggctggcctcgaactcctgacctcaggcgatccgcccaccctggcctcccaaagtgctgggattacaagcgtgagccactgagcccggcctgttttgactttttaattgtatctctttgtattgctattttagtagttactttatagattctattgcacattcttagcttttcacagtctacttagaattaacattgtttttcttcatggaaaaaaagtgtaagaactaggcaatcctatgggttcatttaccactttccatcctgtatgtgatggttgttagatatttactacatccatacacattgtaaactagacaatacaataaggaaatttttgctttaaacagccccatgcattttaaagaaattaaaagtaaaacagaatcttttctatttgcccatgtatttgctatatcctgtgctcttcattccttcctgaagagctgagttcccatctggtctcatttcccatgatcttggagaacttgcttcacggtttttgtagtgcaggtttgcagacagctaattccctttcattttcacttatctgcaaatctttattttgctgtcattctttctttttttatttttatttttatttttgagacagagtctcactctgtctccccacaggctacagtgcaatggtgtgatttcaaaactcctgcccaatctcaactcaccaaccttctcctcccgggctcaaacgattctcctgcctcagcctcccaagtagctgggactacaggcatgtgccatcatacccagctaatttttgtatttttagtagagatgggatttcaccatgatggccaggctggtctcgaactcctgacctcaagtgatctgcctgctttggcctcctaaaatgctgggattataggtgtgagccactgtgcccagcctgctgtcattcttgaaccataatttcactggttatagaattctgagttgtcagttttttctttcaggactttaaaatatagggttccagtgtctttggcctccgttgtttctgtcaaggaatcagcattcatctagctattcccctgtagaccacatgttgtttttccctggatgcttttaagactttttatccaagtttgattgctcagtacctacctctgggcaaaaaagcctccagaaaccagaaacttatctagttttattcccctctgtcaggtgtagactctactccagcttctacctacttgagatattctatactgactccaggctgttgttattttgttctttcaaatattttgtccagagctataatgttttctgcagaattgaccagatagcagctactctctgtgaccaggagccttgatcttccagacttgctgatgggctcacaaagctcctgcccgtggccctcagttggcagtggcctctctgccttgaagttgccatgagtgtgtaaaacctacaggctcaaccttcctcattagtacagtccagaaaagtggaattcctggtctgggtggctatggtgccctagaccactggctagaccagggtggtgactgccagctggccgaatgtggggtctccagcctagcacccttggactctaccccaggagttatggctgtttcagggccaggggcctggcctcagcccctgtcccccttctcttctcctcaagttgcccagcatcaggtcccaaccagcatcttttgcagacagggtgggtcggctcctcactagaggggcagggttgggcgggaagcctgttgagccctccttcctgtgcagcccacagccctggggttagctccagaggggtgcagaaaggagcccccaaaggcagaaactcacccttctctctgttcttgtgcttccagggataaaggagaggtggtcctagctggggggctaccagtggcatgcaggaggcccacatgaccactgtttgctggggcctttccttctctgtgagagagacgagagagaggagagagagtgtgagtcagggtagtgtcttcttccagtaacgcagacttctgcacgtgttctctaggagaaatcccgtcactcgctagagctctagatctggaagaagctctgcctctcttctctcctccagtgcagtgtgtgtgtgtgtgtgtgtgtgtgtgtccccacatgcattacacccttctacagaggaaataattcccgtccaagtgcaaaggttgggattggagcaggcagcatgtgggctaaaggagcagagaggaggaaacgggggcgggggtgagggtgggaacaggaggtgggtagatgccacgaggcatgccttccacaactagaagggctggtggagatgaccagaatgctccagacagaccttttatcaaacttccaaaattcaatcttgtttcatgaagcctgaggaccctgcagagtgaaagacaaggaagggctttcctgcaggggggtgtgtgtgcctgtgtgtgcctgtgtgctgtgtgcccccatgtgtgtgcacgtgtggacctgtgtggtgtgtgcctgcacatgtgtgcacgtgtggacctgtgtggtgtgtgctgagtgtgtatatgtgtgtgcctgtgtgctgtgtatgcacttgcacatgtgtacacagatctcattttccttttttctggcttactaagtgccagaaagaatttccgtgagcctctccacccttcccaaggctgcacatggagggacttgcgcaggcacatgtgcgcgtgcacacaacacacacacacacacacacacacacacacacacacacacacgagtcaggggcgagcactcctgtggattgtacctaggcctggcaggaaaccgggttctgggaaactgtaggccccacctttggcagaaaaccatgtttttgttgctgctcgttgaagggaacattaagtggggctggggacagtttatgttgagaagagcaaattttgcctatggcactggggacattgagtggctcctgtcccgggctctggagggcttgggagacacgtctgcagctctgggcatctctcaaggtcacgggcggccacactcaaggttaggccctcctctgtgtgagctgcggtcagcaggaaggctgacctcagaggcggccccagggcccttggaggccctgcccctgagacatgggccaaggtcagagagccgagaaggctgctgctgaggactctggttggcgcccagcccagcggcccttcaggcgggccctgtgcaggggctgatgaagtcagctgggaaatctgtgaaataaagcacaggtcccccaggcttgcccagagccccggcatcagatgaggtgcagagaagggaactgagctgccaagtgtgaacaggagagaggagccccaggaccacacaggggccccgacatggcaggtgcttggtcagcagcggtgctgcccttactgctggacgtgggaaaatgcactgacacttgctgaccagagccggggtgagcatctgggtgaccctgcagatgagacaaaataagggctgccgtgggggaggggcccttgccgggccaccctgctgaggccctgtgttactgtcctgcggctgtcataacaaaggaccacaaatgaggtgactcaaaacatccgaaatcggccacgtgcggtggctcatgcctgtaatcccagcactttgggaggccgaggcggttggatcacgaggtcaggagatcgagaccatcctggctaacatggtgaaaccccgtctctactaaaaatacaaaaaaaaaaaaaaaattagccgggcgtggtggtgggtgcctgtagtcccagctgctcaggaggctgaggcaggagaatggcatgaaccttggaggtggaggttgcagtgagccgagatcgcgccattgcactccagcctgggtgacagagcaagactccgtctcaaaaacaaaaacaaaaacaaaaacaaaaacatccgaaatgtcttccctaaagtttctggagccagaaatcccagaccgaggtgtctgaaggttcattcctcctgggggttccgagggagactgtcccatgcctttctccgagctctgcggcggccagcaacccctggtattcctcggcttgcagctcggcctaccccccacctggccttcaccctgtgtctcttcttgtgtctctgtccaaactgccctctctgttgtctttttaatttatttttagggacaggttctcattctgtcctccaggctggagtgcagtggcgtgatcatggctcactgcagcctcagcctcccaggctcaagcaatcctcccacctcagccttccaagtagctgggacacaggcgcacgccaccatgcctggctaattttttaatttttttgtagagacgagggcccaggctggtctcaaactcctgcgctcaggcaatgagactttgcctcccaaaacactgggattagagacatgagctgctgtgcccagcctacctctgtcttataaagacacctgtcattggatttagggcccactctgattcaatatgccctcaaataacccaattacatcttcaaagaccctatgtccatataaagtcacattcataggtactggggggtcaggacttgcatatgtcttttgggggaacacaattcaacccacaatgggtctcacccacagaacgaacggcctctccagggtgtgcgcaggtgggtgaggggcccaggagagggacctgcgtggcaagagggcttgtgttcacgtcagagattccagaaggagactggatggggtggctgcatggagcaaggggctacagccactgtctccaagtagttggtgggttgtctggtagaaagggagcatttattttgagttcccccaagatatgaagctagtaccaggtacctggaaggtgctagcgagtagagcttgactctttacagaaagaggtgtttttctcacaatgttcacttgaggacggtggaacaggctatttcacaaggtagtgagttccccatgcctggaagcattcaagcaggggccatgtgggagttgttcaggagtgcatagaagggacctcagaggtccctgccaataccatctttgcttgtcttattttacgacaacttgaatttcagaatgtaatgttattggggatatgtctactagaggggcctccagcatcaggccccacacactatgcatcatttttagggcagggaatgagagcaggctccattctttttggttgtctgtgaggaccaggaggcttgctgctgaggcagcttcctgtggaaacagtgtctcagccccgcaatccattcatcggagctccaacatcttaatgaaacactgtgtcagatgggttctgggcatgtgtgtgcagattgtcacaagtccatgagaatgcacacacgcacattgcatgtgtgtgcacacatgtatgcacacatgcacaagaacacgaagacccgaggcaggtatagtccgtgagacagatccctctaggctgaaagactccccacaagggtccctagaacaaggctccagcctcggcagtccctcccacttctggtgggaggatctccacagagaagaagggtcaagaagcacagctcttgatgctcacggtgtaccaagctctgctttaagcttgtgtcttattttttacttatttagcaaatctgtcgctcttgttttgtgccagatgctgttctcagcactttacaaatattgatgcatgtttgtttcatgacaaccctgtgaagtaggtagtgttaccccgttttatagatgaggaaacaggcgtagagggataaagggacttgcccaaggtctgtctctaccttacacgcacatgaacgctcactcatgcggcaggcgctagtttccctctgatgtgagtcaggccttgagctggttggggtctgggtcccactttggttgtgttttgctgtgggcaccaaggaagcttctagcagcctcatctccctggtatgacctagctccagggactggatttccccaaatgctcctgcccagcctggagcctcctttccagctgggggagggctgaacgacccctcactcttggaggctgccggagcccctcctgcctgcatgcggccgctgccgggtggacaggcctgcttgtgggttgaggctcccagcagctggggtggatcatttctcctcccaagaagctttgggagaagcagctgagggggccagcgtcctcctgaggccaattccctgcctcccccagcgcaggcgcgaagccatctttgcttgtgtgtttgccacagacagtggagggcggtgcaatcgtgacgcctgcttgttgcactttgcgtccttgaggacgttgacccctggccggtgctgggcgcttgctcttcagtcatcttgccctgacctggcgtggcaggcccgagcactgctcttttacaaggaaacaggctcagaggccttgagtcacttgcccgggctcccccagccaataattggctgagccaggatttccatccagctctgtgactccagaagtccaagttcttcccatcacgtcagggccaggaaaggattagaatgcttttctacgtgccgattatttggatgatctgtgcagcttagctcgttgtagttgctcaataaaaatgtggaatgaatgggcctatatgtcccattgtgtgactcagagccaatgactctggctgatcctcctgttttcattccgtggcccagcatctccctttggggtgtgtgaccttggaagcagtgactctctccatcccaccttgaatggtgtctgcgccgcagcaggggagcagctggggattgccagcgcctgttgctggtgggctgtgcgccagatcccgtcttggatgtgtgggtgattgtcagccacatgtgtgtgaagggctgtgcgtgtaggatttgtgcaaatgtgcccctccctgctgccagcccatgggaggctgtcaagattctgcccctgcacattagcccacactctctttgtggcccactgctgtggctgttcccttgtgtcacgtggctgcaggcacagcccccaagtggatggggatcgtgggctgaatgtgcatcagatgctcctgcttcttggtgggtggagaccctcaacccatgcaccgtggctgccgcatctgaaaggccttccatggtgaaggacttggacctgagcaaccctccgcagaggtcttagaagtgctccctggccgggcgcggtggctcacacctgtaatcccagcactttgggaggccgaggtgggcggatcacaaggtcaggagatcgagaccatcctggctaacacggtgaaaccccgtctctactaaaaatacaaaaaattagccgggcgtggtggcgggtgcctgtagtcccagctactcgggaggctgaggcaggagaatggcgtgaacccaggaggcggagcttgcagtgagccgagatcgcgtcactgcactccagcctgggcgacagagcgagactccgtctcaaaaaaaaaaaaaaaatgaagtgctcccagctcttcctcctgtggtgaggttctgagtttccatcctcagaagaaaacctggctggggagggcatctctagacccggacataaacgccaggagaccagggctgccctctcaggtgaccaatcacagagactcagggaaagtcacgtttggaagaggcgacactgtgtctcagcctcattcatttctccatcctacagacactgcctggtgcccagcccgcaccgcgaggcttcctaagcagctctgggcaccgtgcacctggcatggcctccagccccatctccctgccttgggagacccggtggggactccgggctgagctcctgtggctgtggaaccttggtggtttattgtggtggctgagaacagggacgtggggttggacgggttgagtgtaactcccagtggctccgtgaactgcctgggagccttgggcagctctttctcactctgtgcctccgcttcctgatggaaaaatgggggccaggggggagcgaccttgaaggtattcgtgggaaccaagcgaggtgataaatgtagtgtccttggtagagaactggacacagagtccacccccatgaagggggctgctcctcctccttctatgtttcctcttgttcttatttctcctcttgtatcttctcttcctgctttccctccccctcccctccccccccacatgcaggcacactccatttggtgccccaactgcctttctccattgtccttctgtaagtggttctctaagtgggaactcaggcctggaaagggtgggcaccctgtctggtgggctctggcaggccaggcgctgagcagcctcaggagacacaaccctaggaaaaggctcatgcaggctggctgtcatgacggactgttggtgggagaggggaaggcgccgtggtaggggaagctttggaaacatccactagtggccttatttatgactcaggacacctgccaggtcactagaacacagctgaggaagctgtcggccagacgtccagaagcatcaacctggtggctgggctgtggggggacctctctggacaggcagacaaggtgtcggaggaaggggctgacactcactcagtgtctgtcatgcactgagggcacaaagggcaggatggagagctggcccacgccacctgtggaatcttccaggtgtgggggcagatggggaagcaagggggcttgaagacacatgcgctcattaaatgtccttaaatcccaagaagaagaacaaggacacatccacaggggcagggctgaaagtctgatgcatggtgttttggggtctgctcctgctgcaacagctacagtggctccctcttacctttctcttccctccattctgttgtgaaaatgttcaaaacacatggtcaagttgaaagcattttacagggaacacattcagccatcacctagattctaccactaacaccaagctacacctgctttatcacctcaccgtccatctatccctccttcgcctggccatgaatccattttatttttattttttggtgcatttcaaagtaatttcaggtcatcctgattatctctggaatcactgtcagaaattccctcccttcccctcccctctcctttcctttccttttctgagatgggatcttgctaggtcacctaggctgaagtgcggtggtgcagtcatagcacactgcagcctccaactcccgagctcaagcaatcctcctgcctcagcctcctgagtagctgggaccgcaggcatccaccaccacacccagcttcattttcaaaatttctcaccaactcctcactccttgtattcacccaggaccacttctcacaaagccagggtgctgcaggaggggtcagaaccccaagccctaatcctggctctgtcattaacactgtgcgaccctcagcaaatcattttgcctgtctaggtcctgttttcattcctatgaaacgagggcgttaaactgtatgttataaataatgagggctaccagttaccaagctcctattttaggccaggcacttttcacatgttattatgagtcctttcaatctaggtattgttctcaatggacagcttagtcaacggaagctcagagaggtggtgtaacttgccaaaagtcccactacccagtgaatgtccccacggggtctgcacccaggagtctgacacagagcccaggcctcagcacctggcgatgttttgggggtgtgagcagcccagcctactctgggcacgtgtttacttgctgttccttctgcctcatgtttgtgtttgtcccctctgaagctcagactgttattttccagttccaaataccaaaactggctaggcacggtggctcatgcctgtaatcccagcactttgggagaccaaggcgggtggatcacttgaagtcaggagttcaagaccagcctggccaacatggtaaaaccccatctctacaaaaaatacaaaaattagccagacatggtggcgtgcacctgtagtcccagctactcaaggagaacccagctacccagctactgaggcacgagaatcacttaaacctgggaggtggaggttgcagtgagccgagatcgcaccactcctctctaggctaggcaacaagtgtgagactctgtctcaaaaataataaataaataaaataaaataaaaattaaaaccaaatgccaaaaccaacccacaaaataaaccttggttaaagtagcctgttcattttgctttaactatgtatattgcaccagattctgccaggggctcagcgtataaagatgagacccctgccctgccagacaggtgggatgatggccataccttgagttagtcaaggcaccatctggctgtgtaacaaaagctaaaacatcagaggctgagcagcactcggacccacgtcccagtccaagtgtcagtcgttatgggggcccaggacagcccggacctagttcattcctttggtgcatcctcgacacacagcttccatctcttgagctgagatggttccagctcctgccgtcatgtctgcactccagccagagggaagggaagaagggagaggggaaagggcaagtgtccctctttatttttaagggcatgacctgaaagttaaacacttcagctccttcccactggccagaacccagttgtatggccgctcctgtcatcagggaggctgagcaatgtattcttcagctgggcttccctgtgcacaaccaaaacttcagttactatagaaaaaagggagctcagatattggggaaacaactagcatctgtaccacatgcactgatagctctctttgtatgaacagagctgtggcaggccctatgccagggagaaagtaagattggaaaagagcttaccaaggaggtggcatttgcactgtgcttaaggggcaagaaaaacgtcttccaatcaggagccacaaatgcttggctgaagtgctactgctctttcatcctggagctggaacagacgtcaccagtcaatcatgatggctgctgggtgcactggctaacatctataatcccagcactttgtgaggctgagggtgggaagattgcttggggccaggagtttgagaccagtttgggcaaattgcaagaccctgtctctgcaaaaaaatataaaatgtagctgagtgtggtggcacctgtagacccagccccagctactcgagaggctgagatgggaggatcgcttgggcctaggagttcgaggctgcagtgagctatgattgcaccactgcactccagcctgggtgacagagcaggacctgtctctaaaaacaataaaataaaatcaaagttttaaaatggaaaaaaaatcatgagcacataactccagatgtatcctcaagatagcaaacccgggtgggcgcagtggctcatgcctgtaatcctggcactttgggaggccaaggtgggtggatcacctgaggtcaggagtttgagactagcctggccaacagccccatctgtactacaaatacaaaattagctgggcatggtggtgggcacctgtgatcccagctacttggaaggctgaggcaggagaattgcttgaacccaggaggcggaggttgcagtgagccaagatcacaccattgcactccagcctggagaaaaaaagcaaaactctgtctcaaaaaaaaaaaaaaaaagcaaacccagggccaggtctgtagccacatggccaccttcttccctgagcatggaggcagcctcagaaacctgccccacatcacatcagtgggcagttgattgggtcagcctgccagttgaaccctatttgccacagtcattctccatagtaaggggcattctagacataccccccttcccagggaagaataagccgtagctgcctgagcgttttatccagtggtgtgcatgtcttttcccaactctgtgtttagtgatgtcctgtttgtagcttgaaatttgccacagtgggtgtgtttacaccacaggaattggcaaacactacatatcaggccttacctcctgctccctactagggtaggttgttttttttttgttgtttttgttttttgtttctttttttttttgagacggagtctcgctctgtcgcccaggctggcgtggagtgatgcgatctccgctcactgcaagctccgcctccctggttcacaccattctcctgcctgagcttccagaatagctgggactacaggcgcccgccaccacacccggctaattttttgtatttttagtagagacggggtttcaccgtgttagccaggatggtctcgatctcctgacctcgcaatctgccctcctcggcctcccaaaatgctggcattatgccactgcgcccggcctagggtaggttgttagaaatgtaccagcctgccagtttcagccttgtttgtctttcatcctttttttttttttttttttttttgagacggggtctctctctgttgccccccaggctggagtgcagtggtgtgatcctggctcactgcaacctctgcctcctgggatcaagtgattctcctgcctcagcctcccaagtagctgggattacaggtgcccaccaccacgtccagctaaattttgtatttttagtagagatggggtttcaccacattggccaggctggtatcgaactccttacctaaggtgatccacccgccttggcctcccaaagtgctgggattacaggcgtgagccaccgcactgggcctctttcgttctttcttaatgaaaatcttcctgaaagatttgcctactgatgtctgtgtcaataggtactgcctgcgggacagagcctgccctccttttgaaggtctttctctgtctgggtgaccatctgcatgtcactccctgctgctcagaactaaagatgtagctatgcctggggtaggttgggaaaacctgtgggaatcacagagcttgctgtcatgctgtgttctggatacctgaagcttggcaggcaggtgggatcgagggtgggcattaggaaagtgatgtggctctataggaaggggacataggtcctgagattttaggtccccaattggacaaagctgttttttttttctggataaatgttctagcttattcataatcgagtggtcagttttcttttcttttcttttctttttttttttgagatggagtctcgctctttcgcccaggctggagtgcagtggcgctatctcggctcactgcaagctccgcctcccaggttcacgccattctcccgcctcagcctccggagtagctgggactacaggcgcctgccaccgcgtccggctaattttttgtatttttagtagagacagggtttcaccgtgttagccaggatggtctcgatctcttgacctcgtgatccgcccgcctcggcctcccaaagtgctgggattacaggcgtgagccaccgcgcccggccaagtggtcagttttctcagctgccgggtcttgcacaccttgctggctctggagaccatatgcaccatgtagaccccatttgtttcctaccctcagtgttgggggaggggccaagggcctgtcgatgtgttgacacctggccattcactggccttgaatgtccacattcacctccttgaaatcgatgccccgtatcggaggctccatgtggatttgggggcagaggcctgtactccagatggtggggtggccttcaccaatcaggcagattccctgccctgccctgccctttgggctctgtagctccagatgtgtgctcaagatctgtggccacatggatgggacaagccacagagactcagactccgtggtccctgtgaccagagtagccgtggccctgtctgggaatgttcccaccctgttgctgaaggtgagaaatttctctgtgctggagaacagctgtgctgagaagttggcccatctggcttgcaggactgctggggcaagggaggtctgctgccggtctcttccttcctcctctgactgggtgctccttgtctaggttccttgcagcaaaagaattctctaatttattttgttcccttattgagtctctactccatgaagcccacctcctaatcccagctgactggctcccacctcctcaagaggaaggccaggggcagacgaggctgaaggaggctgactcccctgtgccttcgcagtctgagctgatgctgctgtatgttcacagggctccttcagcttttaaaaaggcttcaacacgttcgtcacacgcttgtggctctcctggatgccacactaactcagtaaggcctgagttagaggctgttcctgaggctgtgaaaatagaagaagggtccagaggagaatcccttcatctgacgatcccaggaaggcttcctagaagaagcagcctctgagctgagacctgaagacagatcaggcctgagtcaggccagggagggtgtgaggggcccaccaggcagagggaacaggatagggcaggcacagaggtctggcacctggcttgtggggaagtgtgagcccctgggcatgaccaaggcggggagaagtggcgtgagaggaggcagatgtggctggcaggagatcggcggccccggccttgctgagctccactctgtatgcaccaggtgacagaggctgcccaggacggtgggcagggaagtgacaggtcacatggtcatcccaccaacagccgggagtccagcttggggggacccaagaccctggggaaggcacgagtcaggggcctgctagagccaggagctagtgggagaaggaaacagtgttgcttatgaattataaacagacactcccgcaactttctctgacgtgatacaatctcaaagtgggccacccagaggtgggaaggtgacttctggctctccaggccttgggcctgtcttttttttttttttttttttttttttgagatggagtctcactctgttgcccaggctggagtgcagtggtgtaatcttggctcactaccacctctgcctcctgcgttcaagcaatcctcctgcctcagcctcctgagtagctgggattacaggcacctgccaccacacccggctaatttttgtatttttagtagagatggtgtttcaccatgttggccaggctggtctcgaattcctgacctcaggtgatccgcccaccttggcctcccaaagtgctgggattacaggcatgagccactgtgcccagccgagcccatcttcaagttctccctggccctcagtgtttctgtattagttcacccttttggctccctgcttttaagagtctcccttaagactgtccccaagtggacaggtccccagaaccaaggagcagccttaggagtccccagttacagacactccagggggtccgtgtggccctcagcctctggcctggttccggcagccttggtcctttgtgctgtctctcacatagcctggccagagctggccaggtcccttggctgggccgagtcatcgtggccagtgactcatgcagggggagaaaagtgaggagggggaacagagtgcgagggggactgtgttaataacaaacccattaggtccctgaggtcacttcacaggagggacaaatggttcatttaggttgatctggctgccggctggcttccagagacactcagggtggggaagatttcattatctggggaaagcaataccagattgtctggaggggcccagccagcgcaccccgcgcttcctgtctgcctcccacgcagagcgttctgttcccaaggcggcaggccaagagcgcgagccgaggctcaggtgcaaagaggggtgcggcatgggggcactgcagggcacggggtgcatgcatttttatttatttttttactgagtgttagggtaatttgttaatggggtatatttggtgacataaaaccttctgtcgattcatggcagtctggaacggagtggaagcgtcccactcctggggaacccccacacacatttggctgtgaacgtcggtgcctttgcactggagcctctttggagtgtgctgggcagagcggagaggttcctcttctctcttctccatcatcctgtggaggtgtcaacatgtagccagagatggtcagtggcagtgaggagaggggggcaggaagagaccagggctgggggcttgccagcccacagttctacccctgaacacccatggcctccctgttcaggtcagcgaggctgggggcagagacgggcaggggtcccccaatgttgggcatctccccgctccctcatactctggatttgccctctggagaaagctctggagcacccagaagtcctggggctgctggctgaggtggggagcagagcccagctgtgcctggaggctccccacttccactcagcttccagggacagtctcagctgtgcaggcccaggccgctgaggctggctccagaaatttcttcacaaccaccactggatggaaaaccagttctctaaagggccccagagccagttttgtttcttcttccacaggttcccatagttagagcatcgggtctttgttagagatgcagaagagacgatgtccccagcccttatgtggttcggtctccactgtggatgttggtgatcttagtctccttctcaaaaccaagagggctgatgccccacattccaggcccccagaaagagccgccacccacccacaccgctacatcttctttccacttttctgttccggaaagagtagagtggatatgcgctcctgtagaaatccatctacagcctgactgcagatgtattttgctcccttattgagtctctgctccatgaagcctgccttgtttgtacctctttctctctctttctctctttcttccctctcttccttcccttccgttcccttcctttttctttccttcctgtcttattctttcctctttctttctttcctctctctctctttccccctttctctgtctttcctatcttttctttctctctctttcctcttttttgaacagccaaagatagaatgaatggcataggtaggtactgagctccctgtaactggaggtgttcaagtgtagggtggatgggcatttatagggcaggcattgaggaaggatctccctgggattgtggatggcaggacaggccctgtggagccttctgagcgggtgcagaagagggagggcatgttcctgctccctgcccttcccgggttgccaggccgccactcccaacctccaccctctttccttccacctgctgggccttacgggatgggcagaggcattgttagaacatggagccgcggtccacagagggccagcagggaggagagctccctggggaccacgtcgcctcagtcactgtggtgactttgaaaataaatgctttcttctctgcttgagtccctgttgttcctgctgacgtggaactagggcaggctggtgactcagccctcatccctgcactgcatcggtggcaagttgcctccagcctcagaccccacagagcagggtgccttcttcagaaaaacagtagggaggccaggacaccaagggccccagggacagcctgtttctcctggctggcatgagttctagccaagcctcctggtaccctgggggtgaggaggtaccagctgtgtgctttagtcactggctgctttgaggctgggtcggtgccaggctggccactccttcttgtcccctagtgtgactttgcagagctcccggaagggtcagagggtttttttccatcactggtgtccatgggatactgtgtccccatctcatttttgtactccagtctcagacgggtgctaggaagttggagactttagccatttcacgactgtgtcttgcggggctggagtaggaacaggagtaggaggaacgctctggtcatgggactgtgtgaagagagaaggatcaggaagaaaacatgagctatcatgtctgggttatacctcagcagagccgctggtggcctcccaggcatctgaatttactaatcacaaagctcaccaggtgtgcaaataaacaaatgctgttcaggaggcacagccagggttctgctggagagggatcatcttggaggggtcatactttccacccagtccttcagtccttctgtcctgtgtgtgtgcagcccctgaccaccaccatccctgcccctgccacttgctcccagggttccatcaggttggatgttattgcaataaaatgtagcaacagaaggtccaggcagtgctgcagtccctggtggtatcatcagagccagcaggcagcagggctggggaactccaagctgattcagtcccaagtgccggagcggggagctcggatgaggtgggggtggggaaccggggagccatggagcagagcatttgctgtgctgaaggccaggagcctccttgggagatcatgaatttagaacactaatactttgtttaaaaagtcccctgccttggagataagagctcaggccgctgtggtcaggttttgctgtaaatgttctgcacaaagcaggctggggggatcactgggaagtctggggaacagattggtcatgtgcttctttgagtgaaaccttatggttgcattgaagcggccaggcagagggtgtgatggggtgtggtagctgcacaccggctcagtcaggctgaatggggaaatgcaaactcaggtggcctgaaagagacttagtggtccacagcctggtggctgctcccagtacaggtgatgtaaagagagaaggggttccgggggcttggcccaggtggaaaccatgcactgtctgtgatcctgggcatgtcgaggctggagcaggtctgcttggtggctggcagaacgcacatgaagaatccatgtgtgttctgaacgtcccctctgcccctttgggctcatgccccatcaggagtctcccgactctgccattctgcaaaggaaactgcgctttgtcattgcacaggatcgaacaggtgtgtgtggagtccctaaagccactgtctcaaggggtctcatgggacaatgggagagttgctgtgatgtttaagactaaagtgatggctgggcgcagtggctcacgtctgtaatcccagcactttgggaggctgaggaggatggatcacttgaggccaggagttcgagactaccctggccaacacggtgaaaccccatctctactaaaaaaacaaaaattagccgggcatggtagcgggtgcctgtaatcccagctactcgggaggctgaggcaggagaattgctccgatctgggaggcggaggttgcagtgagccgagatcacgccactacactacagcccgggcgacagagtgagactgtctaaaataataataatgctaataataaataaaataataataataaaataataaaagcaaggacttgaacaaatatttgcacacccatgtttgtagcagctttactctcaattgctcaaatgtggaaggaatggatatacaaagtgtgtgtacacacagtggaatatcattcagccttcaaaaggaacggaattctgtcactacatgtgaaccttgaataatgaaccttgaagacctcatgctacgtaagcctgtctcacaaggacaaatattgtatgatttcacttatgtgaagtcaaattcatagagaaattggaatgacggttgccagcagctaggggaaggaaggatggggagttattgtttaatgaggacagagtttcagtttgggaagttggaagaagtttcggaggtggatggtgttgatgggtgtacaatgtgaatgtacttaatgtcactaacatggaaacttggttaaaatggtaaatttgtcttttttgtttttgttttttttttttttgagacggagtctcgctctgtcgcccaggctggagtgcactggcgtgatcttggctcactgtaacctccgcctcccaggttcaggcgattctcgtgcctcagcctcccagagagctgggattataggcgtttgccaccacgcccggctgatttttgtatttttagtagagacagggtttcaccatgttggccaggctggtcttgaactcctgacctcaggtgatccacccaccttggccttccaaagtgctgggattacaggcgtgagccatggtggctggccaaaaatggtaaattttatattacatatattttatcacagtaaaaatgcattgctctattagaaaaatgatagatttttacaatatgaattaaattacaagttatgaaggaaaaattaagcaaaacattaaaaaattacttataagtaattatatttaaaacaaaagataataaatacacaactttcatcacctcttaggttttttgcaacatttaactattgtctgtcctgttgcggttatgttcttgaggttgtatttgtatgatagaaacactatattcgtggtgactaaacatctcttctcagtctcacctccaatgatgtcatacagataacttgaaattggccggctgggcacgatggctcatgcctgtaatcccagcactttgggaggccaaggcaggcagatcatctgagttcaaaaccagcctggccagcagggtgaatcctcatctctagtaaaaatacaaaaattagccaggagtggtggcgggtgcctgtaatccgagctacttgggaggctgaggcaggagaatcacttgaacctgggaggtggagtttgcagtgagccaggattgccccactgcactccagaccgggtgacagagtgagaccctgtcaaaaaagaaaagaaaagaaagaaattggccaaggcaggaatattgacaccacaggaataggcaagcgctacaaatcgggaaactgagtgttgttgcttttgctggccccaggtggccggttgttgaccgttaactggcacactactggaggagggaggttcagactgattcgcagagagactagaggtagaaacgcaccatggtttggatgctgagggtgagggaaagagaggagtcaacagtggtgcccggagacttggcttgagcaactaggtggatggtagcaccgtttcctaagatgaggggctgtgggaacttgaggggctgtggaaggctctgccactgacggacccagggctcggcagctctgggaggcctactttgtgtcaggccacgcagagataagaccatctgggccctgcccttgggaagtctctgtctatgaggacacagcctgccacctaatggggtgtcccgtctggagcctcagtgttgctgggagaaagcccctcaccttccttcgctctccgagcctcttttgcttccctgccagctgagcctctccatggaggctgtgcctggaggggggtcatggatatggatgtgtgcgccaaacgctgcttcctcgtggatttcctccccactccgttcccacgctttgtaagcttcatttccccggggcctgacctgtggggtttctctccagacctgctccttcccatttccagaaaggcgtgcaggggtttcctatggctctcttccctgtccccatcccccttcccttgggacagtgatctgctggacgggtgggctacccacagggtttgtgattgcttagacatctttgctgtatgaagctttgacctcaaggcatgatgcagatgggaataaggcacgagtttctcctggctgctgtaacaactgtcgaaactgggtggcttatagcaaggggaatgtgtcctctcacagttctggaggccagaagtctgaaatcaaggtgccagcagggccagcttcctctgaagactccaggggaaaacctttctttgcctcttccagcttctggtggccccaggtgttccttggcctgtggctgcatcactccggtctctgcctctgtcttcacaaggcctttttctgtgtctctgtactttcttttctgtctcttagaaggacacagcattgaatttagggcccaccttatcttgagatccttgcctaaattctttctgcagagacccttaaacagaatcaggtcacatttgaggttccaagtgggcatatctttgttttgggggggatcaccggcccactgtaggtctcgttgtgcactgaagacgcaggcggtccctttggccaggcctgcagtcggtcttgccttcttttgtgaccgtggaagaatgcaccttgctggatgcacaggcctttatagttcttttgttcttgccaaatttcagctcagtttcctctctgctgccggcgtgcatcttctctgcccagtgccccttctgggactgtgtgtccaggccctgaggccctagaaaaggggggtggagggcctcctcactatcctgtagcaatgaggcctcattaaaatcctggagccccagactggacccagcccttagctatgatcaaaggacagctcgggatatgattaaagggctagagaaagatgatttaggctgagaaagaggaggccaaggagcaactggattgtccttgaatgtggaaaaggtaattatgacttgaagggtggtgcccagctgtttcccatctcctctgaggacaggaaaaaaaaggaaataaatgatgtacaattagagcagttggttagatacgagggtgaacttcctggctgggagtatggccaagccctgatttgggtttcctgaaagagctcggggaacctccttacctggaggtttctaggcctggtcatgtggctctgagtgattacattgaaggggcagtggctggggctggagccggtgggctctgagcacagtcacgaaggcatgcgcactttctggctgctctcctgccattgtcccttgggttcccattttggtgaggcgtgcaccctggcggcgctccccagggaactaaatatgtttgctgcactgtgcgtggagatggagaatgtacaattggctgaccctgtgctaatctggtggaactccatgccagccctgggaaagaacaattgcatgggtgtgtccacactcaccaggtgctttttagaaaaacactcgagaataatgctgtggcttaggatggctgttgtgccggacccggcatcttcccaggggggctgtgttgttgggctgagtttcttaggtactggacccccaaatccccaaatacggcgtggacaggtggcccagtaggggctggactatccgataggcccaggtgctggagttcagacaagacataccctggcctggcgtggaagatacggggtgctattaatggcagcaatggctgcatttctgaaacccgggctcccaggccgacgagggtgtgcacgcatctgaaatgtctgtggttttgcagttcccatgtccacaaactcacttggttgaaaatagttcaaaatatccaaagcatgagggagggagtgcctgcttttcttaaaaaggaaggacttgatttcatctacttaaaaagccacccaaacctagaacattttccgcaagagaccccctgccccccgcctctccagaatggctggagagtctcagcactcctgcacatttgggatatttcagagggggtggggaggggcaagtgggcagcgagcgacctcagacccaggatgagctgtcaggcgctccccggccacacattcaagggaccggagtgcagttgtagcgttgcggcctgctgcttcgggggtgggggtgttgttccatgctgtgaattctcacatggcccctgactctgggcagaggccgagggtctaagggacggggtgacagggagagcatgcaggagtgggtttctggctttccagggcgagtggaagaagcgcctctctctcttgtaggtgacagacctggggggcccttcttgaggatgagagcctgttgcttctcaagttctgtgtctaacccaggtccccaggtctaccccagcccctcggccctgcctgccttgtggatgatatagtttaagggtagagaccgctggcctggagggaaggctaggcctcaggttagggcccagaagggagggagaagcccttggggcagctccctttctgctcactcactgcctagctccttccttcacaccttccttcggaaacgtctgctcctgacaaggtctacttcctgctctcaggaggcccttattgtggaggaagggaggcgtcgcccgtccctggcttctctgacagccgtgttccatccccgccctgtgccccttctcccggacagtgccttctccagggctcacccaggagggtgcagcggtggcccccggggcggtggtcgtggtgggggtgttagctgcaggggtgccctcggtgggtgggagttggtggcctctcgctggtgccatgggactcgcatgttcgccctgcgcccctcggctcttgagcccacaggccgggatcctgcctgccagccgcgtgcgctgccgtttaacccttgcaggcgcagagcgcgcggcggcggtgacagagaactttgtttggctgcccaaatacagcctcctgcagaaggaccctgcgcccggggaaggggaggaatctcttcccctctgggcgcccgccctcctcgccatggcccggcctccacatccgcccacatctggccgcagcggggcgcccggggggaggggctgaggccgcgtctctcgccgtcccctgggcgcgggccaggcggggaggaggggggcgctccggtcgtgtgcccaggactgtcccccagcggccactcgggccccagccccccaggcctggccttgacaggcgggcggagcagccagtgcgagacagggaggccggtgcgggtgcgggaacctgatccgcccgggaggcgggggcggggcgggggcgcagcgcgcggggaggggccggcgcccgccttcctcccccattcattcagctgagccagggggcctaggggctcctccggcggctagctctgcactgcaggagcgcgggcgcggcgccccagccagcgcgcagggcccgggccccgccgggggcgcttcctcgccgctgccctccgcgcgacccgctgcccaccagccatcatgtcggaccccgcggtcaacgcgcagctggatgggatcatttcggacttcgaaggtgggtgctgggctggctgctgcggccgcggacgtgctggagaggaccctgcgggtgggcctggcgcgggacgggggtgcgctgaggggagacgggagtgcgctgaggggagacgggacccctaatccaggcgccctcccgctgagagcgccgcgcgcccccggccccgtgcccgcgccgcctacgtgggggaccctgttaggggcacccgcgtagaccctgcgcgccctcacaggaccctgtgctcgttctgcgcactgccgcctgggtttccttccttttattgttgtttgtgtttgccaagcgacagcgacctcctcgagggctcgcgaggctgcctcggaactctccaggacgcacagtttcactctgggaaatccatcggtcccctccctttggctctccccggcggctctcgggccccgcttggacccggcaacgggatagggaggtcgttcctcacctccgactgagtggacagccgcgtcctgctcgggtggacagccctcccctcccccacgccagtttcggggccgccaagttgtgcagcccgtgggccgggagcaccgaacggacacagcccaggtcgtggcagggtctagagtgggatgtcccatggcccccatccaggcctggggatatcctcatccgcctcccagaatcgggccgtgggggacagaaggggcctgcgtgcgggcagggagagtattttggctctctcctgtcttcggggtttacaaagtgtgttgggacttgcggggctgctctgtccaagcctgggtctggcgtccgcgtctctgagcctgtgagtgcgtgcgctttcctgcgtcctcttgactgccggtgctggggctctgcgtcctgcgtccgcgggagtaaatacagcaggcgaaggggaagctcacacaatggtctccagcgctctggggcagggcttctgaggggcgggcctgcctctgccgggacctggagcccccgcccctcggagaggctcctaggctgacttgggcagagccctctggtgggccgggagggggaaaggctgtgttgaaatgagcaaactgtccaggtgtcaggccaagctgggaggtgaccagcctgaggtcctccccgctccatggccagaaccagggctgacatctgggtgtcctgagcccagctgcccacacggcccacctggggtcagccctatctgagtgggggaggcggggcctcctgggggaccagaactttggctggacgccaagcagagtgccagtggctgttcttcagggctgggcctgaggagggtgtggggcggcgaagggacgggagggggttgtgatccagtggccactggcgctgtgcagagtgtgagctggaaacatcgtagttactttgtcagcttagtggtgaaagccctttttcaggctctatccctttgcatccctgcttcccagagggaggggaggtctgggtctgcagagctgggagggcttgctgttcccgcccccctcccccacaacacctcctcatctggacatctttgggcacatgctcatactggggtctccctaggtccactgtgttccgttgagcctcctgcagtccccgagtgaatgtgacctccctgcccctgcctctttgcaactcctccctgcgaccgctcctccaggggccttccttgtcccaaatgtccaagtggcacgacttagccggtctgaccactttccagtaagcccttatggagagaggccctgtgttgtgcagagctctcctcctgcctgcgggatcgaggtctctgctctcagttcctaacagaaagtgtcgggcccccagtgggatttctggggaagaactctcgtgtctcaacgggagccctgtggcgggaggggaggccagggtttggggttgtgttcgttgtacagctgtcaccatttgcactatgaaagttgttagtgccccttccttgggtctctgggtgtaactccacccttgcccccatgtgcctccatctggagctgcttctgcggctgtctcccaagccagttttgtgaccctgtaatttagtccaagacaatgggctcattgagaccatcctggtgcagcagttggcaatcctttggctctgggggaaggtttctcagtctcggggagtggggcctcaatctgctggttccctgtgtttatcagtctcccccttgtgtgtcctgaatggttttgctgggaattctggtcttagagccatcaggtggcccgagtcgataggcgtgagagagtgtgtgtgtgcatgagtgcgcatgtgcatgggggctgacctggggtatggaaaggtggccctccctggtgcccaaggagcctggagtatagttggagggtgtgggggtgtgtatatgggagttggacaaccttgggtggacagacagacgtggggaagggatgattgaaggaggtggaggagagagtgtgattcagcccagccaggggtgatgtggacaggcagcttccgaatcagggtagagaaaagtcaccactagctagcaggggagaagtcagtatggaggaggcggaccttgagggagagtaggaattggattgcaagaggaaggagagccttctggccagcagcagccagcagcagtgggggaggctggaatgagctggctggagagggggctggggcataaggaggggcctgcctgtgaagatcatatgggccaggctgcggagggccaggcatgcccgccgggagtgcagctggtccacgggaagcatctggagtggctgggaatgggcgcaggagcagcgccgtgggagcacaggtctctttcccggggcggctcacctggtgtcttggttcctgcaaggtaggccgaaagggtggggaggaaactgccagctccttacagcgctgggatggtggccccagggttcctgaggccagcggatgtgggtgcctgtcaccatgtgggttgctgaggggcggagactccaggggccaccccaaagcaggacgagctctgagccacggcatctctgggggcagttttccaatcgagcagacgtctaggcctggaatcctgtaacagaggccacagggccctgatcagggtgttctgggaggcttagaactagtggcagtatacagggtagacggcaagtgacctggcatggggaaagaggcaggtgcccaggccggcacagcacacccgtaaggaacaggtagacgggaagccgtccgtgggcctgtgtgtgtgctcggagttaaaattctgccaatgtcccatgtcctgggcacatctaccccctccctggggagcacctttctcttcaccttttccttccccgcctgtccccttcacccagggccttccccatccctcccgtcttggggaccgagggcaccatggctttatgttccatcaccgatgagttgcacagggattcagtccttccgctgttcaggccgggtccttcaggctcagggttcccaggaatggagagggtatcagtgtcttccatggactcaaacttcccgcatcccgcctttgctcccccttcaagataggtctccgagcttcaaggttttagggctctgtggaggccgccacgtagcagcaaggagaatgttttgtatttggctgatgagatttttagagtctcattttctacttttccactgtacaaacgggcctccaggcgactgcagcacccgccactgcccgtaatagggtgacaagagggatgaccctttcctctttctcccttctggttggtggaggcacggggctggcggacggcatgtgctttcgtgaattcaggccaaatctgttatcgcaaacacgattacaactcgggtctttgtgtaacaaaagcctttccaagtaccagctgttggcctgctttgctcagcggtgtttgctgtaaccagatttgcacaccgagaaagaatccaaaagtccttgatgtttgttgaaacaatctggcccaggacccacgtgctcagatcccagagctgtgtggcatctgagcttctcccgagcccccactgtcgcccgaggaggacccccagatctgtgttctggaggcagagcaggctgtgggacgggcttctgggtgggaaggaccatgtggatatgccttcttgtctgagagtcccaacacctccgggacgtgggagctggcgcgctggcaggattcaggtgcctctttcctctctagagaaaaaggccccgttgcttggtaataggtgcagacctgtccctaattaatgccagtaggcctcttgcgtgatgaaccctgcctttcagccaagactcaaggcatcctgtgaatactgcctctctgcagtttgagcttttgtggtgggaggcaggagccatggggagtgggggcaggcctcttacacgggtcccacagccactggcagcactgacttgatgctctttgagttcagagcccagggccagacagacccactgtcccgactacgagttggttcatttagaggggggcggacacagcacccaggcagcagatgcactgtgatcagccttgcagcggggctgtgggttctctgggctggatgtccgggaagaggcaggtggaggtaaacgccaggacacccctgcagtgactgggtgactgcaggctggaaatgctttctgtgggctgtggctgtccaggaaggttttgaatggggctagtggacagagtttgcatccagaggggcagtgctttggaggagtgaggggtatggcagtgtagggatgcccaggccgccctcactctgccattggaaagctgggcggcttcggtttcttcagtttcttcgcctgtttccctgcctgcaaagtggggttagaaacagctctctttgagggttgctgggggactctgagatgcagcccatggcgctgagcacgggtcctgcctcctacgggtgtggtgggtgtcgcggctggtgtggcatctgggcgggaaaagggggcatttgcaaaggacaggtaggtttggatgcttaaatatgcagatctggggatgggaggtctcaggcaagggcctgtgtgatgccactgtatgaatgaggccggacagcatggtcaccactaattatggaaagcacggcagacactagtgccagtagcgcccgcctgggggtccctctgagcccgacaggtactcaggctcccagtgcagccatgggaccccccttttcctgcctggctgacattctggaggctggcgtcatgttggctgcaggttcctcttactgggaggttgtcctggtcttccctgccaccatctacccccacccccaccctggagtgtcacagatgggtggaccatatgcccatctgcagggccaagcgctgacaatgaggtgagcacttgctggatgaccggaccatgaggacagcgggggcgctggcagcctgcgttcggctctgcaggctggcctttccctgaaaagcggttgtggcagagtgtgcatcccagggagtggtgcctgctgccctgaacattctcatccagcaggcctctgcaagggcccagtcaagtgtggtgcagagctgggctggcagctggaacagtctcatcttgtctagtggtgagaccaagggctgatgggccaaggctgcgtgctgcttgcccagcccgtggacccatccactgagcacccccatacccctacactgggcccggggtgtcaggaggtggaggggggactgggtgcctggaaaaacaagcccaccgagagcctgagcccccaggggtcagtatcaggcagtcaccacggtgcccggtacacagtggccacctggtctcgtcggctgtcttggtggtggagagcgtgcatggtggccgtacgtgatgggcatcacccagggtaatacagatatgcagactgtgcatttgtctgtaggagccagggacttctcagcctggcaacctgtgacctctgcctacccgttgggagagaggtgctgttccctgatagcctggtgccgggagagcagaactagggtctcctcctcctttctccacctcccatttcttacatgcccaggcatcaggggaggtcacactcagggatgagtcttggccactgggttcagggcctcactgttgccatctcttccctttgccagccagccaaatgcccgtccatcatcgtgccggggatggggctggcctgctcctctgaagtctccttggtgtatagcctaggctggagccccggacgattccgccaccccctcccccgactttttctttttattttgattcatcccagaaacccagccaaaaaccaagttcctgtgctctcccttgacaaagccactgaggaaaaatggtcaaacactgcctttctttccaaagccctcttggtttttcccaaatttggaggctctgagttgcttatgagaccaaagggtccggaactctctggaacacagtcccagaagtgggaggatttgtcatctctccagccaaacagacccaccagttggcccctagacacccccaggcgcctggggcatttctgggctcaggctgtttaatttggtctgcagagccccgaggctccgtttagactgggccagcagacagttctagagacttcaagtttgttgtcgtttttaaaagtcctgccaatgcccagaaacttagagggacaagaagatgacctcgatgtcagccgggaccataaacagtgaggcccgcccccccccccacccatgcctgcctccactgctcccgtagctgggtctccaggggattgcccgtggccatgggggaggccgggaatgcggggctcagactctactgggcttctcgtatttttttgtttttccttgtccatcttctttctcggaaatttctgaatatccccctacagcctttggcattctgtcactcctggcatctctgggccaactgggaaagccatcatttgtccaatatccagaaaatcaaggggcctggccttaaatacattgcagtgccctcctccccacatggcatcgaatttcctgtgtcctcaaagccaggagcctgtgccttggatgtgggcgatggagccttgcagacacctggagcggctttcctgggagagtctccctcgccttcccatccacccgcttcccctcccctgccccaagctctggtcacagcctcggaggggtcatctgagtgtaggttgcctccaggtgtacagttggaggggggcagttaccccacatccccctgtctgctaggggcacccccagggactcaggtcttgagggacagcggaagggtggggtggggagtaggccgttgtctcgtgccacctgggtgttatgtagactctgaatgggcagttcctgggagctggtttttccttctcaccccttctacagtgctgcccctctgaggggctggagctctctggagccctttgcagcctgtggcaggtctttctgattctgtgcctggtttcgcagcctccaacccatagccagtggcatgaagaacattcctggctgtctctacctgtggcctttgcaggcagcagttccctggggcagggcctgggggtcctggcacctccttgtgggaccccttgggtatgagggagggagccacctgggccacagatagacccccttcctgtatccaggaggttcaggatggacctgtctcatctttctttctggtgggaagagagcattcctggccatggggaatgtggcctggacagagccacctagcctctcccctcccccaggcagggccctgaaagatggagatggctctgctcctgccaggtcaacagccagcagtctggtggatttccatgcagtccaggcaggatctccttctgtccccaccccccaccccatgtgcaggaagctggttccaagcagggacccttggccccgctttccacgtgggtgggcagtttccctgcgaggggcaggccaggcccctgccctatgtcccccagagaccgatgttatctacagtaagagcatacaagtctttttggctccaaaccaggcctggaggggtggtcttctcctctgtcctctgcctcttgccccccattaaaggtcagggaatggagtgctctgtatgtttgctggggttgggttttttcctttggtttaaaatgaagggctggaatccctggtgcagactgcacggtgagaggtgctccttgggatccactcgaggagcattactgctgaatgccctgccaggccaggagcatcgctgggggtgggagaggcagttggcttatttgtttatccaacagccatccatgggtaccccaagggccagctctgttctaggcactgggggtctaggcatgggctcaggagaaggggtagaacgggagggcttcctggaggaaggcttcctaaccagagaccggggtaggagtttgccaggcaggtgatgctggccagcttctcttgccattttccttttctttttttctttttctttctttctttttttttgagacagagtttcgctcttgttgcccaggctgcagtgcagtggcgtgatctcggctcactgcatcctccgcctcctgggttcaagcgattctcctgcctcagcctcctgagtagctgagactccaggcacgcaccaccacgcccagctaattttttgtatttttagtagagacaaggtttcatcctgttggccaggctggtctcaaactccttacctcaggtgatccgcccaccttggcttcccaaagtgctgggattacaggtgtgagccactgcgctcggccttctcttgccatttctgcagactcatagtgtgtgtggaagactgtatgtctgtgcctggcacagctgccctcggcactcaggtgggaggtgggggagagggctgttggtgccagcacaggtcatggcatgagacaggctcccgcagccaagcggggtgcaccgcagcattggaggggccctgctgcgcacgagatccaggctctgcatctgtcctcctccccaggaggcctggagggctgggagggaccagggtggtgaaataacccaggtgggagagaggcactgttggagaggcagagggagctgcaggtttgtagcagcgagctttaaaccctgggcctccaccagaaaacctcagaaagggctgctttgcttttttttctaaactacaaaagaaacccttggccgcctgggccccttggggtcgggtgggggaggagatccttcattcgcacctttgcaggcccagtactgtgcagagggaggagggtggaggcaaaggcgagggaggagggtggaagcaaaggcggggtccctccctagccccgctgccctgcctggttgctgctctcagacccctactcctggcccggaaacatggaatcttgggacagctggggtagggggcacagaacggagaccctggtgagggaggaactctttctccagccctggctgtggccacagcaaggccaggctgggaggacctcactcaaatatttacatctctcctaatatttaaatgatgaagcaggctcctgcacacagctgccctggagccagctgttgcctgccctaccctccctctctccctccctctttctttccctccctctttctctccctccctccttctctccctccctccctcttgcattctttgtctctgacccaagtccaggcccttccagctgttctctccttacccacaggcacctcctgtgactgagcttctccttgttatttttcataaccatttcctttaattgagcacctcctaggtgccaggccctgggctggtactttgtatacaaggtgtcttttaatccccacgagagcccaacaaggtagattgggctgctgaggctccagcgctggaaggccggcccgggtcctcccagtccgcacctgcatccatccatcactcccccactgtggagacctgttccctggcccctggctgagcacgatggaaatctctgtctactagtccttggagagtggggatggctgagggtcccgaccctggggtctgacgggggctgcctctgccccacttcagcctggctgctcttccactcaatgactgagtttgcaaaaccagaataacagtgctacctggctggtactttgggtggctgggaggcgtgggagagggtgcacggaggggctgagcgaggtgtcagcatcgtggggatctccgagggtagccttcccaggcccagggcggagtgtaggcagagggcgcgatggcccagcgtgccggctcacatctggccttgcccttgcccacacggcaatgtgggggagtcatcagcctctcagtgcctcagtttcccatctgtgcaatggggacaagagtaaatcactgtcttcaggtatggtaagcactcatacacattgactattgcagaatgaacacagtgagcccttcttaggcttctactacatgccaggcagggtgccaggccctagtggagaggggacaatgatgggcaagctggctcctgccctcaagggctgtcgagcagggaggaaggcggcggctgccctgactgtgacccggagtggggtgattcgcaaagaggctggcgggaggctggctgggggctggctgggggctgctccctctcctgcctgtgttccgtggcagggtattaaactggcttttttcatggatttccgaggccctgactgtgggacctcgggcaggttttgggaccttgtgactttgttcccgcttgtcattcaggcctttgtcctcagcagtgcccagcacacggcgacttctgcatgtccttcagtgtgtgactgaccctggagctgagacttggcagctgaggctggacattgtccttggataactcccggggaggtgggggcagggtggggctgtgagctggcaactccgagtccctagcagcctccgaatggaggctttcctcttgtaggattctcggggaggaaggaggggatgggggagatgaggcttgtgagtcttcaggagggcagaggttcacacctgcagcgccccagaaacactccggggtgcccaggcttacccagccctcctgagccagaaccaccaagagttggggaccagcagtccattttttagcaagatccagaaatgattctcctgaacagtccgagccaagaatgacatatctggaatcagaacatcagaactacagaggaatcgagagaacgggcccaaaatgtgtagggacctcagccacatggcgccacatggaggaaagcacccaacatcatcactgtatgaacctgtttaaacacacacacacacacacacacacacacacacacacacacacacactccccagtaaagagtggaaagacatttgtcagaatattgatggaagttacctgggttgtgggtttatagattttttccctttgtttttgtgcattttgcaaattttcggctttgtgcctaaattccttttacagtcaggaacaaagcaatagatgttattttttaaagttcatgggctcgtgcccgtaatcccaacactctgggaggctgaggcaggaggattccttaagcccaggagtttgagaccagcctgggcaacatagggagacccccacctttttttttttttttttttgacagagtttcactgtgtcccaggctgaagtggcggtggcacgttcttggttcactgcaacctctgcctcccaggttcaggtgattctcatgcctcagcctcctgagtagctggattacagacactcatatttgtaggatttgagaatcctacaagaggaaagcctccattcggaggctgctggggacttggagttgccagctcacatattttttagtagagacagggtttcaccatgttgaccaggctggtctcaaactcctgtcctcaagtgatccatccatctcggcctcccaaggttccaggattacaggcgtgagccactgcgcccggccatgggagaccccctcttaaaacaagaataaaaataaaaataaataaaagtttactgtcaaaaagaaaaacacatcacccaacctaatctccccctaggattgagagatgaggaagcagaggccggaaagtgtcacattccctggtcgctggcagtcaggggacctgaggcctgggctggttttctcgtgctccaggcctggggtgtcaggtggagcccctgctttgcccaaaggtctaggtgcctctgccagcactgcttgcttctgcatttttggccacaaggaatgtgggccaaaggcagggtccttgacctctgcccaggagggtgaagtgggctggtcctccttgtccctgctccaaggcccctgcggctgtgcctttggaaactgctggcccgagctagtgtgcggagctgggacagacctcaccgtggccctcgtggggtcattccatgtccgggctggaagggatctttcggtccagcccttcctgttcctcatcaggaaactgagaccagagaggtcatctgcctggcccggggtggggtgtagatggcgcttgtgactcctgcatgccacgtgcagacagtccctcagctgtgggcttcccacgcaagcagccatgctggggataacttggctgaaacctgcgatttaatgaagagaagaatgactcctcctgcagccctgtgccccacaggctccctcctgcccccacccctcctgcagaggggcctcatgctggtgggtgggtccctgttgctgcaatgggcccaggcagtttctgggcagtggaggcttggctgtcttcctgcccaatgtcccctgtagcccacgctgtccgggaagggcggggaagcactcagccactggggacttcacaagatgggtatctgggagatgctgattggcaggccaggctcccgtggcccacaggcaggtcagaggtcacagtgctgagctgggctgagttggcagctcagggcagtgggggtgggggtaccttgctcagccatgggcctctctggcacaagggtttggagtttactgtaaacaactccttcagtttttccttctctcataggccaccagcagaattgaggggccctctgttgatgaggtgtggcctgggaggggctagttgtctgtccacctgatccttgcggacaggtgaccacaggcttcctgccccagggggctgggggaaagatcggggaggcctctctggcttccccacttggaaggaaaatacgggcataggggagacactttacagggacacatttcagccagtaccctctggctgtgctgggggcacagtgcctgccctgcccacaagaggggtcagttctctccaggatttaacttcagccttcagtgcagggcagatgagcactcagaggcccagaggactcatatcacgagagagaagctgtgaccacacaggcactgaaggttaagcagaagagtgggacacacgggtgacctgaaagtcccagggtcagtgtggttagccccagatagctggggagctttgggtaccaggcttagcaggggaggagggcccccgtgacagtttgctggggctgctgcaacaaagccccacgaactttgggggctgaagatggttctagaggccagaagtccaaaatcaaggtgtcgaccaggctgatcctttggggcctctgcgggaggctccggcccaggcctctctcccagcttctggtggctcccgggtgctcctgggcatgtagatgcgtcacgccactccctgctccgtcttcacatggccttttctctgtgtctctgtgtctcgtaaggatgcttgtcattgcatttagagcccaccctaaatccaggatactctcctcttgagatcctttattgcatctgcaaagaccctattccaactcctgtcacattcacaggtccgagggctagggctctggcatgtcttttgggggtcactattcagtccactgcggcagctgatcttaggggaagcagaatgttctaagcttggggtgagcggagggaacgctgctgggtggggagtgggagaccaggctcggagacaccgcggatctcctctgtctgatgagggcgtgatgaggttctcatctcaggtcctctgaatggcggctgcttctgaggagaccctttcccctggatctgcccctccagaaacctccacttaggtccaggtcccaaggtggatggtaagaggcggctgtccctgccacacttgatgggtgagtgtgtgaacggggctgggagcaggacacttgtcacttctgtggacagattccagaggctcatgaatctgctgctggggaaggtgcctgatctagcctgaccctccacccccacctcccccttcccgccccccttcaccagccctgttcccagagcttcacttccccaaaggcaggcgccgtttcctggacttctcagcagctaccccctaccccagacccctctcttgtaggcccctctggtctcagcgcctactcctccctgggcttctgcccctctaccgtgaggcttctgggcagaagtgtggggccccctcgctgtgtctggctctcgcggtataccaggggtcctcccaggggcccgccctgcccgctaggtttccagggagcttttcaagttcttagatgggcttgatggagtttcccaatgcgttgtctcagagcaggaggggccccggctgagtccgagagtcccctcagtcacaccctgggctgtttggggcagccaggcagcccgtcttctggaggtgctgcctctctctggttaccccttctggaatcttctgcgtccagttgcggcccctcctacacagcacacccaccacccccttttacctgtgactcttctttgtcaacctcttcatgtctttgagaatggagaccaggtcctcctcaccctggagttcagcagaacctaaaccaggcagatccgtgtaggttcacgtgggggctctgtggccactgtggctctgccgtcacctccagcccagcttggcgcgctttggatcatgtcattcagtgccggtcctccaaacctctcccctggctctgcaggtctgggaagcagctggctcctgggtgcagctgtgaccggagcctgaactctgctccctggggtcaccgtcccctgtaattaggctgcagctcatattggctcgggcagaggccatcggctgcccgccttggggccacaacacagagagccccgtgattaatggaggctccacctgggccaagtggcccctggtgttaggcgcttttttttttttttttttttttttgcattttttaagtgcttgtaacatttcccctaatggacaatgagacgaggagggagggaggggtggcttctctgcccaggcagatcaggaatggtcaccgcctgtgtgtgcagtgacaggtctgggaacagacaagggagagcttgtccgggaggctggaccctcacaccgatgctgcctgtgcctggcagctctgtcccgggcctcagaacagacactgaccaacacgctcctcagggtctccaggtccgggtcctggtccccggcagagcttcccatccatgggaagaagcaccgagcagccttgctggctcctcgcagggagctgggatgcatttctaagagcagcatgcgtgaagcccggggtctgggcaaaggagtgtttggggaagagtctgctgttgttggagggtcggaagtagaggggaaggaggggcacgcggtaggctgaggaggtggctggcgaccctgtggtggggacgagggggctatgagcagaccaggagccagcatcacgtttctctgtctccagaatcgaggacggagagctgccagagaggccctggcggggtgtctggggccacctaaagggcgtgggtggattaaagctgaggaaagcctcattttgggggactccgtacttaacctttgaggccctcagagctgcagcctgtggtttttcgaagtcaatcacctcccagggcctcgctcctgccttcagcgacagccatttatcagggagtctttgacccaaggagacctgaaaggtcatctggtccctctcctacccccaggcaggccacacctagaccctcccacacagatccgtcccacccttctgctgccttccaccagggacggagggtgggcggccctcccacccaggccctggcggccccaccccagccaggaaattcttcctctttatctgcctcacatctcttcccctgcggcttccgcccatttcccctcaatctgctcctagtggagcagccagcagctggtttagaacccgggggtggggggagcgctagaccagtgcagcacatctgagagtgtgccagaggtgctcccattcccatagctgatttagtaaagaaaagaggaagtccagcaacttagcgccactttaaagtccgcctggaatgaccctgtggctgccggaaccaggggcacgcggtagatgacgggagcaggcacagagaggccttcgtcccggatcagtcgctgttgccctcttggaggctgggctgcctttcaagaagaggacccaaggccctgtgagcggtggcctcctctggagcctttactgtggtcctggttctgctctgcgtaaagagagatggcttgaagcagaagctgctacgtggctgtcccaggcaggcgcccgtagtcccagctactcgggaggcggaggcaggagaatggcatgaacccgggaggcggagcttgcagtgagcagagatggcaccactgcaccgcagcctgggcgacagagcaagactccgtcttaaaaaaaaaaaaaaaaaaaaggagtagagaaatctttcccagaaggcctgcagtcacctccccttcatgtttcagaggtaaaaaaaaaaaaaactgcacatttcgctttttttttttttttttgagacggagtctcgctctgtcgcccaggctggagtgcagtggcgcgatctcggctcgctgcaagctccgcctcccgggttcacgccattctcctgcctcagcctcccgagtagctgggactacaggcgcccgccaccacgcccggctaattttttgtgtttttagtagagacggggtttcactgtgttagccaggatggtctcgatctcctgacctcgtgatctgcccgcctctgcctcccaaagtgctgggattacaggcgtgagccgccgcgcccggccacacgtttctgttcttgaacaggtggctccctgaccctgggtgtggttactccaagaccttgctctggtggggcacaattctggccccaggtagggcgaccgtataacttactgtcccttgggggacacgttagtgaaagggacccttgaatgactacggtgggacaacagatgtgagctgggtttgtcccaggaaggctggatgtatgggcctcttgagccagaggagacaacagcagaaagctctgcggctgatgggaccgagcaggagaagggccggcggaggctggggcaacaacgcacttgcccactgtgaagggcctgtgtgagctgatggctgatgagagggcagtggggcgaggctgcctcctgccaggctagaccagctccaggacacccatatctccttttcagaaccggtgactcagtggctagaaggggcttcagaattgacgggacactgagggagtcgaatggaatggctggagtggccacagcaggctctaggcctcctcccgtttcttttctgtgttctgttcctggggtctatatcctggggttgctgtaacagagtgccacaacctgggggcttacaaacatagcttccggcggctcctggagattcctggcgttccttggcctgcagacgcatcaccatcatctctgatctctggcccctgtctccacgtggctttctccccctgtctgtgtgtctttctccttttctgtcttttataaagatgctcaccattggatttagggcccactaaattcagaatgatctcaccttgagacccttaccttaattacatctgcaaagatccgttttccaaatgtgatcatgttcgcaggttccaggagttaggacttaagacatatcgttttgggggacactgttgaacccactacatttaataaacccagagttggtgccaatgtcccctgcggacaccatagcagattctggaggttccttgtaaaggaatccgtaggacttcttttcccttctggagggatgagactgtagctgggctggggaaagctgctggttcaagctggggctggttcagctggtgctggcttgccaggttgttagagagctttatccagggagaaattaacatcacaaagttgggggataagagaaggtttggaatcccaagggctggctgttgaggtcagctgcccacccctttgtgttccatcttacagggacccaggcctgccagtgctccgtttctggaaggaatgctgtgggctgctgtgccccataggcagggtggagggtccccttgcagccagcgagctgctcttcctgtagcgtgcagagggaaggaggaggcttgtttatttctcttggcctcagccgaaaatccaaccacaggctctggcactaggcagacctgctcattctcacatcatcattgcagagtgagccaggcctcttgggtggggctgtgatgagcaggaaggacctccggagtgcctgggacttcttgggcccagggttgccagaggcagagagaaagaagcctcctcctaacacttgagcaaagatagtcatcagaatccatcagagtggcctcctgtggctcttccctgggtgctgacccccctggtgcatttgaagttttcagggatactattgacgctccctgcacctccatccaggggttagtggaaatggttcttttcctccttgtccagaggtactgtggatgatgaccccaggtcccagacctcagtcattgggccacgtgtgcagataagcctgggcagtcagtaacctttggccaccaagctggcctcctgcggactgggccggcactggaggcgggtcttagctgctagcactgtggcccagccaggcctggccttgggaaggcagagggggaggggactgggaaagggattgagctgggggtggggtggtaccctggttcttccctcccagacctttggcaggtttgaactatctggctgcggctctctaaggagggagcgcctcctccgccttgatgtggactttgccttctgttcacgttgtccctgtccctaaacaaatgtggctctctgtggggagcctgggggccgccctccactgacactgctgtttcctggcttccctttgcaggctccgctcagcttcactgcgcctatttttaagcctttccttttggacggttttgcttcctgagaacacacccctccccatcaccccaactgtgtcctcctccctatccggagcctgctccacctgccccaggagccacctccctcctccaccaagcagcccaggccaattctggagggctaatttgtgtccctccagaagcaggtcctgagacagggatttcagtgggaggggacaccaggggatgcctgagtgtgggaatgggccaggcagggaatccagccaataaagggtgcctcaccagctcattgtgaccacaggtggctgcccagcccccataccgggcagcatggggagactgcagaccgtgcccccagccttgtcccacctggggttgggtaagggagctggggtttttatacttcagttcttggccaaggactgcactgctcactccttccagccttccgagggcttgggcactaggaaaggctctgggtggagacacggaaataggccatgtgaagtcagtgggcgtgattggtagcagtaaggccaggacagccttggtcaccagcaaggtgaccacacatttcagcatgcacagcccccacagacacacacccaggagatggtaattacaccagcaacagtcacccctgccgcgtgccatgcctgcacccagggaatcttattttttatttatttatttatttttatttgagatggagttgcgctcttgttgcccaggatagagtgcaatggcacaatctcggctcaccacaacctccgcctcctgggttcaagctattctgcctcagcctcccgagtagctgggattacaggcatgcaccaccacgcctgactatttttgtatttttagtagagatggggtttctccattttggtcaggctggtctcgaactcctgacctcaggtgatccacccacctcagcctcccaaagtgttaggattacaggcatgagccaccgcgcctggcctcaggggcaccttattaccccatcacctcctacagcaggtgacactgaggacactgaggctcagagtagactgtggttatgtcactctcctgtttggttctcctgctctcagccctgaaataaagagcacggtccctgtgcaggcccatacgtcctgtctccagccctggagcagtccttaagctccttgaaggcacaccaggcctttgggcctcgtcccccaagtcctggataaataggaggtgaaggagcctttgcaactggaccccactctgccagcgccaaggccctgcctgactacccaccccaccctacacagatcagggacctgtgccaaggtccagtgtcacaggagagtgaagacaaggaggtgcccatggcgtacatgctgctggactcactctgtagatcctaagggttatggggagttatctgccaggtgaggttttcccgtggctttttcctgcaggctcagggtagcatacagggaggtgcttccctactccttggcaccatctgtccggcttccctgagccctgaccctggctcctagatagccagtgtttcttcagggacagaacctgctttgctgctgctcagaggagacccagtttgaccagggctagcgttcctggaacctgagcctggaattccaccctgccctgggcagaggccacgttgctccctcctacgagagctgagctgcgcatgagattattctgaccttgggctctaccatttctttgcatgacatttgtcccaggctggagcagggctctgtggctcgcttggtgttccctccccagactgaggcctgatatgtacaccaggaagtgcttgatctggtttcaggagctgggagcggtttgccaggcagcctgtggtcagagcaggggccttaacaatggtcccttgtgcggcacattcctctctaaataggcccaggtccaggctgctcctgtttcgaccccgccatgggcctggaggggaaagtttgcatctggagggtggcccactgtggcctctttttgtgtagcagctgagaccgtaggtgcttgagaataggagaagccctgtgcccatcctgggctgtgagatgtttttccagaggtggggatggggatgggccagcatgcagttacccacaccctccagcttgttggcatcaaggtctgtgtatgtgtgtgtttttttttttttaattttgtttttccaacatggagtcttgccatttgcccaggctggtctcggactcctggctcaagcgatcctctagcctcaggttcccaaagtgctgggattataggtgtgagccaccatgcccagccagtaccaaggtgtgttttttaagagcaatattggccgggtgcagtggctcacgcctgtaatcgcagcactttgggaggccgaggcaggcggatcatgaggtcagcagattgagaccatcctggctaacacggtgaaatcgtgtctctactaaaaatacaaaaaaattagccagacgtggtggccgggcacctgtagtcccagctactcgggaggctgaggcaggagaatggcgtgaacctgggaggtggagcttgcggtgagccgagattgcgccactgcactccagtctgggcgacagagcgagactgtctcaaaaaaaaaaaaaaaaaagaacaatatcgatggttttattccctgaacatgctaagtgatccccatgtagtataagcatctcagaaggcaggaaaatgtaatgaacaacacccaccgccattcattccatccagagatcgttattttctgcccgggtgtgagtgtgtgtgtgcgtgcaaactgcacatgtgtgtatgaaatggaattaggatctttgtatacatcttgtgtcctgctatttttacttaatattctcggcatttctcatcttcaaaaatgtgattttaatgatggtgcaggcctttgacatatgggtttagaaaatctgcggaaacccggactgtttccaggttttgtcagtttaatgctgatgcaaatgtcctcgtacgtaaatctttctgtacttctgattatttccttgggataaattcccagaagtgggccaaagcacatgaacggtcttcaggcttttggagcaagttgagatcggtggggattggagaagggacccagggaggcttttgggagcttgcgagattggagtctggctttaggggacttgaattcacagatgaaggagatggctggcaaaggtgggaacctcctgctctatgggtgggggggtgacactgctttaccttccagtgacagcatggggatcctcccaacatgacctggctccgcatctttctgacactgtgcacggtccacagttgtgatgctcagctgggagcctcttctgtgtccttcagttgcattaactccttgcagacagaggaggaagctgtccggtgctcctccctgctgcgtgggtcctttgaatctgcccagttgggcctgtggatctgtgcagtcacgtacggggttctaaaatctgcaaaatgacaagctcacgaacactctcgcttctgtgggtgaatgtggataccccttggctgcgtctccctccacagggaagatggagacgtgtaaagtgacaaggacctgctacccctgggcaggttatgccggttccactgtgaggatggtggcagggggcttcccaggaggcctgcacattgggaagagaggggcgaccgtgtgtgactgcaggacccagggcgcagtcttaggactctgatgggggaggagatgctggggagccctgttctgccagcctggtgacagacatctcctaatgtttcccggctgggtacaactcacaatgtcctccgtggggaggcaattgcccatgaggcatccctggcagggatgatcttgtttcattgccacatatcccagcaatgaaacaagaatctagagtgatgtgattcctccgatgacttctccaaccatctggggtttttgtgcgactccaagaagggggaaggaggcagctctcgctcctctgggctcctgatgtggcagctctggaatggccacgtgtccgttggcccacagtgggccatttgtcgaatgtggttgtggtgggattggggctgggctggagagtgggtgaccacaccagctagcctcaccctgggccactgtgcagccaggggtttcatcttcccaggggtctcgttgtgagtgtcctggggctgctggaacaaattactggaaaccaagtggcccaacaaagattgattcgctcatggttctggaggccacaagtttgacatcaaggtattggcaggaccacactccctccgacagctcgaggggaggacccttccttgcctcctccagcttgcgttggcccaggcgctccttggctctggcagcatctgcagtctctgctctcatcacgtagccctccccaccgtgtctctttgtgtcccaagtccccttctgcctttctcctataaggacaccgagcactggatttagagcccatcccaaatccaggatagtctcatcccgggatccctaatcacatctgcaaagaccctttttccaaataaggtcacattcgtgggttcttggggttaggtattagacatgtctttttgggggtcactagtcaaccctctacagaacctcagacgaaagtgaatcttcacaggctgaaatgggggtgaaggtctagtgcgtccctcctccttgggagctccctcagggcttgtgcctatcctgtgatcctgtgatccagccttttttttgagatgaagtcttgctttgtcgcccaggctggagtactgtggcacgatctgggctcactgcaacctctgcctcccgaatttaagtgattcttctgcctcagccttccaagtagctgggattacaggcgcccacccccatgcctagctaattttttgtgtttttagtagagacagggttttaccatgttggccaggctggtttcgaactcctgacctcaggtgatccgcctgccttgggcctgccttggcctcccaaagtgctgggattacaggcatgagccaccacgcctggcatttagtaggttttggttgttttttttttttgagacagagtctcactctgtcatccaggctggagtgtagtggtgtgatcatggctcactgcagccttgatctcctggcctcaagtgatcctctcacctcagcctctcgagtagctgggattacaggcatatgccaccacccctggccaatttttgtattgtttagtggagtcggggctttgccatgttgcccaggtttgtcttgaactcctgggctcaagcgatctgtccaccttggcttcccaaagtgttggggttacaggcgtgagccaccacgcctggcttagtaggttttctagaagcgcctgaggcctggtgaaggcatggtgtcatggagtagagaacattcaactctgttcccggggagccggaacacacccctcgtagccaatctcaacagtcatgacgtggccaggatgacatggggagggggtggtgtggactgtgtgggaggccagctccccgggaagggggctggagtgggcttggctttgaggaggattcccaagaggaggaggaggcggtggcatgctcgtttggggggatggcgtgagccagggtgggcacctcttcatttaggtgtcaccttcttgacattccagccgggacatggtttccttggggaagatggacacccccagagtggggcatctcctggggaagatggacacctccggaatggggcgcctcctgttctcactgttcttctagcacacagttgtattctcttgcagttctggaggctgtgagatctcctggctgttatctagaacaaactcgcctttgagcagcgccgtcctgatggtggggtggcccctgcgggtggaacagcccctgctgtctcagagcttactgagagctagtgggcatgggagtggtgctggaccgaaacacccagagggatcatagagccaggcagtaagcacagaggccagctagtggggagggagggacccatccatgaaaagacaccaagcattgaaagagaggagaggatggttggggaccggcacacatgtgcattttgcgcagatggccaaggtggtgaggcgccagccacgcagacaactggaggaaggaggagtgccctaggggaggggccagctccggttctagaatgatccgcttgtgcacgtgggcctggctggaataaatcattgcatccgcaccgtagactcaatcgtaagctcacaccagggcagcctctgctttggtgcagtgtcttcgatcatgagttggccatggtgggggtgactccaaggggactcccaaggagggggttcaccggatctcccagggaaggtcatttgttttcttgggttggacctgggacaaggccttctcctgtctagtttctgttctccaacttgaccgcacggaaggatgctgaggacacctggaagccggcccctgctctacagcacccataggacagaggcacaccatgtggggacagtttggacagtgctcaggaggcagggagcagatcagaggaccgcgggaggccctgggaaccgcacgaggacccaggcattgagctctgcactttctggcatcagcccgatgtacagtctggctctgtgtctaccccgtacttcactttccccatctgtacgggggcggtaataatattctttacagcccaggtttaagcgggtgtagatgtgatgagcttggtaagcccatctcattacattcagttctgggcattgaaccctggactttctggctggtagaagtggacattcaacctttccttggggccctggggcttctgcagaatcagaacacagccagcagtttgcatgcagggtgcagagggacagagggacaccatgtcgggagcccacacctggcacacccctgactctggggctcagtgtcctgctgccctgcggccacgtgatcagctagaggtcatggctggacccataggcgaatacagcctgtggatttgattttgtttggccctgcggtgttttattttatttttagttttagtttgtggagacagagtctcgctctgtcagtcaggctgagtgcagtgacacgatctcagctctgcaacctctgcctcccgggttcaagcgattctcctgcctcagcctcctgagtagctgggactataggcgagtgtcaccatgcccagctaattttttatttttagtaaagatggggtttcaccacatcagccaggctgctcagtgttttaaaaagggcttgttttgctttgtgccagcatttaaagatcaggagatatcatataaagatccagatttctactctcttgagaagtgaacagctctggccacgccgggcccatatcctctagggcagtgacggagctgagacagggcctgtgacaactgagagttctctggagtccacacggctccttgcccagcttctggtggaggttgagcttagtgacccaggatttcgtctgtgtccaccaagaaggagaggtgcctgtggcttagagagggcgcccacaggagtgccttgcccaggaagctggcagctgaggcggccagggttagggggttgggcttcctcttcccctccccagtgcctgagtgcatttggaggaagagagacgggtgaggggaaggcactgaaattggtcctggagcgctattattgggggctggggaccagctgtcatcccttttcctgtgggcaggggaggcagtggtgggatcccatgagacccggactctgtggcctggtgaggcagggagcggctggggagacactgtgggtctccacaggggtgcgctgtgggtctggcctggggaaggagctggtgaatgtgcctgccatgtgggtccctccctgctctggccctgataaccaggagcggctggctctcatttggagtgcggttgtggggactgtggaggtggcagcttcccaggtaccatccccactgcctccgagggagcagaccctggtggagaggcaggatggctgcagggcgggagctggtggttggcatcactgcacgggcttgtagtagtggatgggaagatgcaggagaggctgatgactgagaaagttggttcctgtggactaagctgggggagccggacaaccaagtggttagaaccttgggctctggtatcagcctgatgtacagtctggctctgtgtctaccccgtgccccactttccccatctgtactgggggtactggtattctttacatcccagggttaagcggctgcagatgtgatgagctcggtaggcccggcgcctcgccggcactgaaagctccagtgtccgcccttagtgtcattgatggggttttgttcctgctgcggttctgattggttacagttgcggtcacttattattggaggcatgtcccccgctgtggctgatggtagaggtgtgtttgctggtggtgtcccagtgtgtgccttggctggaggtgaggagggataaaaacagccgcgacaagaaggaaatcaaggccgggcacggtggcgcacgcctgtaatcccagcactttgggaggccgaggcgggtggatcgcttgaggtcaggagtccgagaccagactgaccaacatggtgaaaccccatctctactaaaaatacaaaaattagccaggcatggtggcccgtgcctataatcccagctactggggaggctgaggtaggagaatcgcttgaacccgggaggtgccgctgcactccagccagggcaacagagcaagactccatctcaaaaaaaaaaagaaggaaataaaagtcttctctggaactagaacgttcctatgtagacgtagctggagggggaggctgtgtggtttgcgccgtggccatggcaagacacgacgggcagcatcttcccactccagcctgcatctctgccccagaactcatgatggttctcctaggatggggctgtcccttccgcttgctgagacatgaaggacgggaagagacccccggccctcaccgccgcatcgcctgccttcctctgctgctccttagcaggaaacatgccggagtgttccctagccatccattcaccaattgcatcccctctctttatttttcagccttgaaaagatcttttgaggtcgaggaggtcgagacacccaactccaccccaccccggagggtccagactcccctactccgagccactgtggccagctccacccagaaattccaggacctgggcgtgaagaactcagaaccctcggcccgccatgtggactccctaagccaacgctcccccaaggcgtccctgcggagggtggagctctcgggccccaaggcggccgagccggtgtcccggcgcactgagctgtccattgacatctcgtccaagcaggtggagaacgccggggccatcggcccgtcccggttcgggctcaagagggccgaggtgttgggccacaagacgccagaaccggcccctcggaggacggagatcaccatcgtcaaaccccaggagtcagcccaccggaggatggagccccctgcctccaaggtccccgaggtgcccactgcccctgccaccgacgcagcccccaagagggtggagatccagatgcccaagcctgctgaggcgcccaccgcccccagcccagcccagaccttggagaattcagagcctgcccctgtgtctcagctgcagagcaggctggagcccaagccccagccccctgtggctgaggctacaccccggagccaggagggtgagtcgcagagcgctaggtcttggatgctgtggtaatggggggcctggttgctggctttgccacagaatcttggaggaagaagctggatatggggtggagggtgctaccctggagacccagaaagaccggaatgcatgggggtgggggtctgcaagctcaggagaggtggctctctctgtctgatgggaacatgccaagatgccccaagcgggacttgaatgagagtttggaaagattttctgggtttcaaggagcctcctttatgggtcaccgtgggccttgctgggacctctgtctgctgtgtgtccctggagggcctgggaggcttagagaatgaggagccacgcaggaaccagggcaggctcatgcaggggtgtaggacagggtggagttgagacccctagaagggctgtcacattctggtggctcctgcttgaggaattgcaggctgcctggatatgcccagcagaggccgagggcttggggaagggaggagggacgtatgcctcctgaggcttgcattggagcccatggtctggtcctcctcccccaggagggatggttgtggcagagggaggggaacatgaggagcaccttagcctgcaggacaaaattctcagggcactgggaaggggtgcctggaccagggggctgtgtgatagctgcacacggttttatttgggggtgcccttctggcgagaggagagaggccatggggctccagcagcgtcctgggagggctcaagcccacagccgtgctgacatggagcttacaggcaggggattggtgccagtcctgtgggacacagggcctgtttggaaatgccaggctgtgggacatggttgggtcccttctcagaagcgtgccccctggccccagcagggatcgtggctccatggggctatagtaaggtgccagctgggttagaagcccctcaagagccaggtctgattctgggcacaggatcagaactcagtaatgctcagtaagccttctttaggttggacaaacagcacagtctgggtttttgatttagctgctgcttcttatttctaaccgtggtgaaatacacaacatacaatgtgcaattttagccactttgcagtgtacgtttcagcggcattcagtacattcacggtgttgcgcagctgccaccgctgtccatctccggtacccttttcatcctcccaaactgagctccgtccccgttagaccaagctccccatgcccctcccccagctgctggcagccaccattctattttctgtctttattatgaatttatttgaccactctaggaaccttgtgtgtgtggaaaaatacaataactgcccattttgtgtctggctcatttcactcagcatgacgtcctaaaggttcatccgtcgtgctgtagcatggggcagaatttccttcctttcagaggctgaataatattctgttgtgcgatgcacttgtgttgtgtagctgttcctccatcggtggacccttgggttgcttccacatctctctaagtccctctttccatcttctttgacttttctttgacttttttgagacagggtcttgctctgtcctccaggctggcgtgcagtggtgtgatcactgcttactgcaacctctgccccctgggctcaagtgattccccagcctcagcctcccaagtacctaggaccacaggttgcgcgccaccatgcctggctaatttttaaattttttttgtagagacaggttctcactaggttgcccaggctggtctcaaactcctgggttcaaatgagcctcctgcctcggcctcccaaagtgttgggattataggcatgagccacccaacccctttttggtttttctttttgaatgagagttctccagtggtcagtgggcttgggggctgggaggatgtggggcctggagagggtgtgggtttggggggagaccagtgctcctcatgctttcatgggcatgtggagtgcacatttgtcttggcgggtctggggcctgggactctgcatttcctacagagggggcatcggaacacactgagtagccagaggctagtgggccttggaaggtcctttccggccctcagtgtgcgagtcccgtgttccctctcccatctctctaagcttgactctgaagagccaccctgccccagccacccagactcagtgacagtggttgctggtggcatggtgtcaggccaaaggcatgggcagtttgcagagtggcaggaggctgtttcctcccctgccttctgttggtgcaggacctttgtttgacgtgccggatacacccccatcctgggttgatgtgttcacactcagctgagtcaaacaggatgtggctggggaggcggttgtcaccgagccatctaaatctcggtgatggctggtgctggatgcacagggacgtggtcctggctctgggggacaggtagggggatgtccatggggatgtacaagaacattctcctccaggggcagacacagtttagcccctaaattgtgccagagactgtgccgggagccaggcccagggacacaacctgcgggctctgctttctggagctcaccgagccgtgagcaggatggctgggacacaaggagtgtccagggagcttccccagcagtggaagtacaatttcatcaggccaggaaggggagagaaaggcaggccacgtggaggcagcagcgttcagagctgccaggaacctggcgctctggggggacggtggctttctccatggaataggatgtacacgttggagccggggcatgggagaaaaccatcagcatcccagacccggccacccacggacagggacctgtgcaggtgggagtccagctcacgtggagaggtccgtgggctgggctgacagtcctgagggcctaagcaagtccaggtggaggaaatgcagggacagacgagggcagggccttcccaatggaggagtgctcttgaaatccgatgggagtggcttctcggggggcccaggcctgagccccactagttcttcctccgaggcaccacctgcttgcttctccgtcctccctctctgtgtcacgaccgttctggacacggatccagttctctccaactcagcttcctgcccatctttccttcaggcccatccccttctgcccctccatgtggggctgggctgggagttccctgagccccgacatgcacagctctgaccaatctctgcggcccctctgtcccccgagcaccagggatccagctggcaccatggggaaaggaatcatggagggagttccgtgccctctgagcagacgcccagccccttggcttctgcctgcgggagggcatctgtgctgtggtttgtctccaccccagagctgtgggtgcagggcagggtctcctggggccccagctgaattgctcccagactgacttccccaaagcacagcactgctgagatctcttcccgtgctgagccttctctgctcactcaccataggcccctccacggttgattcactctcctgctcagctcacacctctctccttcccagcttctcctgctttggtcttcccttggtctctcacacctttcctcacaacccctttgccctgacctcctgaaccctgacctctgcttctctttacatcactgccttggtgaactcctatgcatccctcaaaacctggtccaaatacctcgtgtttggcttgggatataaatgatttgtgtataaactttctttcctctgctagacttttttttttaaatgtgaaagtagtttttcagatcataaaaagtaatcgagtaccctttctttaaaatgcaggaagtacagaaatgagaaagaacctaaaattcacctgtaagccagcgatatccatgcttgaggttttgctgtatagtcttcaaaattcctttcatgcccccactagattctgagggtagggctgttgtctttgtttttttttgtgttttttttttgttttttgttttttgagatggagtctctctctatcacccaggctggagtgcagtggcatgatctcagcttactgcaacctctgcctcccaggttcaagcgattcttctgcctcagcctcccgagtagctgggactataggcgtgggctaccacgcctggctaacttttgtatttttagtagagacggggtttcaccatataggccaggctggtctcgaactcctgacctcgtgacccacccacctcagcttccctgacctcccaaagtgctgggatcatgccaccgtgcccagcctgtcttggtttttataaagaatcccataaggggccaggtgcagtggctcatgcctgtaaatccagcactttggaggccgaagcaggcagattgcttgagcccaggagtttgggactagcctgggcaacatagagaaaccctatctttacaaaaaatacaaaaaattagccaggcatgatagcatgcgcttgtagtcccagctactggggaggttgaggtgggaggaccacctaagcatgggaggttgaggctgcggtgagctgagattgtgccactgcactccagcctaggagacagagtgagaccctgtctcaaaaaaaaaaaaaaaaaaaaaaaaaatcccataagataccaagtaagtgacttggacataataggtgtgccatgaaattatgctgaaggagtgagccactggtggtgagttgggatggcttttttgtggttcttgtaggcagatgtagtgacccccatgggtcgtccctagagaccaagcagaaactttcctggtcaactttacccccaggacacctggtctctcctctggaggttgtgctggagggctcagtgggtgggtgttggcttcagtgtgggggttctggaaggagtcagcatttcaggagggagtgtgggcacctagatggttgaaggggagggagaggaagagaggcgctgcagagggcagaggcatccctgcctgctcctccgccccagggcctggtgaggtctgagctttatgctggtggggtggattctcggtttccgaggctctggccctgcccctggacttggcaccctccttgctgtcctcccacagaagggcgctcatcctttggggtcatccctggtcctctcaggctctgggtggggacggccttgcctcctctcctggatccctgctcttttcctgccccccaacatgggtgcctctgggtggagtggggtggggctgggctgcagcacccagtactgagcctgcaagggctggctgctggctcagagccccccccaccagagttacccccctccggctcctcagccacaccagccaagtttctccagagctgccttataaggcgggtgctcagcgctcgttcatgggtctggttctctgccttcttgggatgctcactgggggcaagagggaggccaggcccagtgcccagctcagttctgggcatgtcccagctctgccccatgagtcaactggttctgaactatcattccacccctcccagcctcaatttcttgatctgtcaaagaggcatctgcagaggtggctgggggctgagctctcatgtatccacccaccccaagaaccaagaagggagtccacagtggttctggggccacttgtgaacatggatgtgaaattggggcggggtagacatggcagcatgtctcagtagttttcctgtgacccagagggtctggaaatctttgtcatgtgggtggagcgttgagggagcagggggtcaggcccccccgagctgatgatggtgggcgtggctcttcgcatacttggtccgcaccgggccgtgtgttccaggggcagaacagggaggaatctcagcacagacagcagggctgccagtacagcgttgagtatagggttaatcaaagcacagggctccctggaaccacccaacacagagcagtgaagaggtggctttggggaaagtggggtcagagctgagcctgagtggggggtggggagggcgggcatcagcctgcaagggagggacacctactgggccccagaagttcctggtggggatcagggactgtgaagttggggagagggtgaccactgtgatttagggaggaagggccccatagacagcccagcttctggccccgtgtttacaggacaccccacataggctctgagcctatccctggactgtggactccctgaggcagggtgtgcaggttcgtccagtaccaggtgtaaggcagggggccttggtaagcgtcgagggactcactggtgtctgatgaagcagtgagtttggatcgtgtcatgcctcgggtcctgagcctgcaggatttttctgtggggctgtgtgcttctgcttctggaggtgtccagaaggcactgacgttcctgccgggatgccttactcggaaggtcccgctgctcccacctcctcccattttcctgagctgcttgcagagggcacccaggtccccttttactttgggattgggtctctttctctttccccttctaagaacaagtaccctccttctccgaactgtccctggagcctctcagacctaggtctagagtgggaagtcccgcatgtgctgggggaacaggaatcaatgcgggaggattggccaggcccggtgtgtctccttcgtggtgggacggggtggggccagagaacagagcctggctccagagcccaggaagagaacccctcccctcgccggcctgccaagcaccgtgcagtggtgagaggaaaggagggctggtccgggaatgcagcgggtgccgagcagctgtggaataccttaaatagagcgcagctgcggggaagggtggggccaggaggcaggcgctgggggcggtttctctgctccgccccctgcagctctgtggccctgaccacccagcctggccccaggatggagccccggcccccagacacatggcactgggtgaggccgcctctcagcacttgtcccaggaagtcagagcagctgccagaagagagaggagctgtgtctgtacccgccgcctcccaggcccgggacagctgccgggattgagggtctgcacaatggcgagcctgtccggaggggcgcgccgcggccagacagccatgctctgtgcggtgtggacagagggcacattcagccctggaggagcgcactcagactccccgcctcggggcccaaagtgtgggcagcccctaaccagaccctggattccagcagacagcctgggaggatgccatgtggtccaccctgacacactgtctcacctgtgacctcatttctgagagctgcagggaggcgcttcctcagttggactccacttcctctccggggttttctgtgggtgttataagtgactctgtctccttcagtccaaggggggctcctggggtatgggctgtaactgacaggctagagtagcccatggccagggctgagcttccttcccgttctctctgaacactgggcccaggaaggggttaaagtggagatgctctgattaaagttgagggaggcatggagctcccctgaccctgtccccccatcccactgctgctactgggtgtactctgtggagccccaggactcttaaagaacccagagtggagattcccggtctcatccagtgcaggtgagggggaaagtgatttgtccacagttacatggctaccatcagcacacctgggtcaagctcgattccactccacggcccctgtctgaaacctggaactggaaatggccctggaaatcactgattccatctgccgccttccaaaatggcccgcagaggttaagatatagactcctgtaatgccttgcccactcgtgtgtggggaaatggcagaggagcaccggctttgccctcacactgcctgggctgccgcccctgccctgcctagtggctttcctctctggtccgttttctcattgtggaagtgggcacaattcttcctgtgcagcgtggttagagtggacagtgatgattcgtgaagcagggtggagcgcctgggggattcgtgttaaacaagcacataaacaaaagccaacacaacccttacttaatcagcaagcaggccttgtctgaagcccctgggcagcacctcatgccatccctaggttccaggccggtggtgtcgccccgtgtctctctcacccgcaagctggtgtttagaagccctgctctgtgttctggctcccattctccctgtgacctttccctttcttcatcctaaaaagcaatgcacgacggggcgtggtggcgggcacctgtagtcccagctgcttgggaggctgaggcaggagaatcacttgaacccaggaggcggaggttgcagtgagctgagattgtgccagtgcagtccagcctgggcaacagaacaagactcccatctgggaaaaaaaaaaaaaagcgatgcccagtcattcttagatagaaaatgaagatcacatgaaatttggaaagaagtttttctctcccattccccaactctctcccaaggggtggccatgttgacagctgggtgtggcattctcctgaattttattcctgcagagtcattcagggcttgtgtaaaaaaagtcaatgtgtaaatatagacttttcaagaacacaaaggaaatcagacttctgctaccagcttttattttttccatttaacaacactgttgccacttgtagatgtagcacgttcctttttctttttctttttttttttttttgacagagcgtggcccaggctggagtgcagtggtgcgatctcagctcactgtggctcactgtaacctccacctttcgccttccgctttcaagcgattctcctgcctcagcctcccaagtagctgaaatcacaggtgcttgccaccacacctggctaatttttgtatttttagtagagacggggtttcaccatgttggccaggctgctcttgaactcctgaccttgagatccgcccacctcggcctcccaaagtagcacgttccttttaatggttgtgtcatcagctgtcccatggccctgccaggcttgtccagcttcccactgtgattgagaggctgcaacagatgttctcgcacttgtacatgtgcacacatgactgaaggatgagctcttagtgaatttctgtgtcaaggatgtgtgcatttaagttttgatctgctgggcacagtggctcacacctgtaatcccagcactttgggaggccaaggcgggctgatcacttgaggtcaggagttcaagaccagcctggccaacatggtgaaaccccatctctactaaaaatacaaaaattagctgggcatggtggcttgtgcctgtagtcccagttactcaggaggctaaggcaggagacttgcttgaacccagcaggcagaggttgcagtgagccaagatcgtgccattgcactccagcctgggtgacagagcgagactccctatcaaaaaaaaaaaaaaaaaaaaaaaattgatccttgttcctgaattggcctctaaagtggttactagaattttttaggacccctcccctcgtcgacctgctcagctgtctgctgggccctgtgcagtgatggtccagcagggaggtcctatgccccttacccctggctgagggccaaatgctctccaattggtgttttattttgtgcatctcggtcaagcgagagggattatctcttcgtatgttataggccagggccctgtgttctcttttcatttggaaggtgtatccttttcttgttgaaattttttaaaaagagttctttgtaagccaggcgtgatggctaacacctataatcccagcactttgggaggctgaagtgggcggattgcttgagcttaggagttcgagaccagcctaggcaacatggcaaaaccgcatctctgcaaaaattagctgggtgaggtggtgcgcctgtagtcccggctactcgggaggctgatgtgggaggatcatttgagtctgggagtttgaggctgctgtgagctgtggtcataccactgcactccagcctgggtgacagagtgagatcctgtctaaaaaaaaaaaagagttatttgtacatctttatcacagcaggtacgagtatcttgtccccagctgcctacttttgattttgtttctgggatgttcttctacacagaacattttaatcctgatattgtcaagtctctgctttcccttttagcttttggaattcacatcctgtttagaggtctcctgcgttctgaaattataggaaagaatttcacccacgttttcttctagtacttctgtggtttcatttttacatgttgaaatcatgaatccattggaatgtattttggtttcagcagcgaggtaggggtagatggtattgcttggatacacagcagcgagcttggtctggagcgggtggggcgtgtgtgtgtgtgtgtgtgtgtgtgtgtgtgtgtgctatttttatcagttttggtgtctgcattgtgctggcttagcaaaaacaatttggatgcatttcttttaccctctgccttctggaacattttaagcagcaacataataatctctctgttaaaacttttcaagaattcactcgtgaaaccatctgagcctgatacttttgggggagtctagcactttaaaaacttaaactttttccatgggtctgtgagtttgggagtttttctttcttcttaaaattcattactatttttttcctagaaaagtgtcttttagcttatttaaaatccgtcagcttattccgagggggttgctttagctcgcttagtgaggacagtgtgcagcgcggtgattgacatgattgatcagcagagcacgatcgatcagtcggtgtgcaaacatgactgactgtggccagcgtcctgggatgctccatgttgaggcacatgtgtgcagtgcagggtgatgtgtattctgagaggggatgaagccacaggacccctgcacccttaggagagagcccccctccccaaggctgcagtcttgagtaggtagtgacgggactgggtctagggggctgagtggtcccagcaggccaagggcttcaggaattatgagaagtttggagttgcccagagagcagctttcaaaaccagtctggactgcagcctccagaaagacatgcgattgacaccacgaaccaggacacacctatatatggggtgggggtggggatgggatgtattaatgaaaccaaatttccgtgatggaattcttacctttaccatgcgtgtgctacactcagtattttctttttttttttttttttcccctctctctttttttctttttgtttgtttgttttggagagagggaaggctttttttcatttttttttaaacagctttattgagatccaagtaagctactatacaatccaccaatttatttatttatttatttttttgagacggagtttcactcttgtcgcctaggctggagtgcagtggcgccatctcggctgactgcaacctccgcctcctgggttcaaccaattctcctgcctcagcctcccgagtagctgagattacagacatgtaccactacgcccggctaattttgtatttttagtagagacggggtttctccatgttgaggctggtctcgaactcctgacctcaggtgatccacccgcctcagcctcccaaagtgctgggattacaggcatgagtcaccgcgtggcccaatccacccatttaaagtgcataattccatggttttcagtctattcagagagtagtgcaaccatcgtcaccacaaccaattttagaaaattgaaaatttgagaaatttagaaaatttttttcttaagaagaaaccccgtagcctttagctatcaatcctgccctcctcctccatatttccttcctatctgtgtggattctttttttttttttttttttttttgagatagggtctcactctgtcacccaggctggggtgcaatggctcaatctctgctcactgcaacctccacctcccaggctcaagccatcctcccaccatggcctcccgagtagctgagactacaggcctgtgccaccatgcccggctaatttttgtattttttgtagagatggggtttcaccatgttgcccaggctggtcttgaactcctgggctcaaatgatcctcctgccttggcctcccaaagttctggaattacaggcgtgagctactgcgcctggccgattctagacatttcttgtacagagaattgcacgtttggcctttgtgtctggcttctccacttggtgtcatgtttccaaggtccatccacattgtggcaggtgccagtgcgtccctgagtaatattccaccatggcatggaccattccattgtggacagacatgttgccttcatcagctgagggacattgggttgctgccaccgctggtgagtgtattcttttcaaattaaaaaaaaaatgctggtcaccacccactagatcgttttcttggcccacagggtgggacaagccggcctgggtgagggccaggaggtggccaggtggaggcggctggagcggccctgggttgcctctgggcgcagcaggcagaggtgcaatggcagagtctgagcaggttccctgggcggatctccatgccggtaatgtttgtttattcaagaagtctcggccaggcgtggtgcctcacacctgtaatcccagcactttgggaagttgaggcaggcagatcacctgaggtcaggagttcgagaccagcctggccaacatggcaaaaccccgtctctactaaaaatataaaaattagctgggtgtggtggcgtgtacctgtagtcccagctactcggtaggctgaggcaggagaatctgcttgattccaggaggcagagcttgaacctaggaggtggaggttgcagtgagccaaaattgcgccactgcactccagcctgggtgacagagtgagactatgtctcaaaaaaaaaaaaaaaaagaaaaaaaaagaaatctccagtgctgccctgtgcccggcaccgaagccgagggaaggcagcattagtatgagctcccagcccaccgggctcctgtctggagctgacgtgcgaccaaggcacacgagggaagcatggcgaggtggacggtgcggaggcataaggagcaaaataaggcagatgcagtggctcagtggctcctggtggctgcgaggagcgtgggcaggacagccccaggagggcacctggagagcagggccggctggggcaaggtgtgtcaggcacttgtcaggagcaaaatgtaaggggacaccaaagagctcaggaatcaacacagatagtatttaatgcagtatttttcaatatcgaaatgatgcatagtaatctctatgatgaacaaatgttggaattttaaattaagacaggcccagccctgcacgtgcacagccctgtcagagtttgttcagcgtggaatttgatttgtttaaaatgttgcttcaaaatattgtttgattcctggattttttggcactgccttaacttttgcacctggacgaaggcctcaccctaatcccagctggagagggtcaagggctggtgaatttggctttggacctgcagagcttgtggtacctgagaggtggggccaggaacaggaaggagctggtgagaacggcacccggtatgggatggggccagatcagagcagcactgtggctctttccaacccgtggttttgctgctggatgcttggcgttggtgctgagcccccggccctctgaacggagtgtgatgaataacggggccggggagctcttgggcccctccctgaagcagcagtgaagccagggacatgccggcagcaggcagggagagggacgtctggtctgtgcctggagccagctgccccatggaggagctgggtgaggatgcggtgggaggaagaccttcccagtcctgcatcctccgaagcataactgagtgcttgtgtggcttgggggtcactctggtccgaggacagtcttgctttgcttagccaggctttgaagagccaccgggatacggacagcagccctgctgggtggcaggttgtccaccctcgcccactcaacgctggaactggatgcagagcacctggatggccagtcccagagtgtctctgacactcccagtcacctcatcccttagaccaggataagatgcgggatcccaacctcgagcctcccatgggctccattccatgtgctcccataagccactgggcccacctcctggctccagggctgtctggccatttggcatcttggtttcctcatctgtacaatgaaaataatagtcccagccttctcgaggagttacaagatgcctttcgtgtgaaaaactgggatttggtaccagactatctggatttgaattttggccctacccctcctaacctgtggctttgggccaatctggcctccctgtcctcagtttccccatttatagagccatctcattgagttgctgggaggatgaacataaggaagtgtactcatgtgcccagagcattgtgattttacttattattaccaaacgaggcacacaataagtgcctaatagatgctcagtgtcatttcacggattctgtgtgccttgtgtgtctccagcagccaagctctggaggtggggaagctgttgacgagttgcacgaggtaattagaaagaggaggccacaggtgcaagggtttgggtgacacctgtggacagagagaggccgatggaccctggcagaggggaagggggcccttgcacatagaaaatgtttcctgcatccaagatccttgtgactctggaacagaggcagcagaggtctgcaaattccaaatcataaacccagaaagcatagaacattcgtagagaggaccagaaacatcatatatcttagtgtgtatagaattttccacatagccaaacaaaagcacgtttctaactgaagctgttggagagttcctgaggactttataccagacaagggccggtaagtggaagttcaatacgcaggagccattccttttgttcacaaatgtttgccgtcttttctgtctatatccgcattcatgtgagggcactcataggtccaccgtccagccccatgctttgtttgctaccaaaaaatttcttaagaattcctcagctgcaaatcctcctaccggagggggggttccaggaacccagccttgctcggggttggggcacctcagcacctgctgcacaggcgttggtcattaaaggtcatgtgccgtatccgtgggccctcggggtctggtggcacctgggcacacagtccagtggcggcctcctacctgccagacactgggagtggggggctcctcattcctgttccctggcggtggggggagtgccccgagctgtcacacatcagaacccaccgactcacacgttgcggcaccttacagccccttgacagcctctcagcctgagagaccatcaaactgagttcctggagagggtggctgttgaggcctggacacaggtgtggacaggatagccctgcctcatctcggagtcccgctccggttcagcctcttgtgggtctgaagctcaggctgggccagtccctgcccctcagatggccggaaaggcagcccagccccacggcctccttgtcaggctctgagagccgcctggcctccagctctgctctttttttttcttaagatggagttttactctgttgcccaggctggagtgcagtggtgccatcttggctcactgcaatctccacctcctgggttcaagcaattctcctgcctcagcctcctgagtagctgggactacaggcgcgtgtcaccatggcaggctagtttttgtatttttagcagggaccggttttcaccatgttggccaggctggtcttgaactcctgacctcaagtgatctgcccacctcggcttcccaaagtgctgggattacaggtgtgagccgccacgcccagcctccagctctgccttgattttctcttaaggccgtgaggatgtccacgcctcctcctttcctcacggcccattgatgtctccagatgctctgcaaagccaccctcccctcgggagctccccagctggtgacgggggaccttttggggatcactgcccaggtagtcatgtaggtctgtgggccgtgcttccaggctggaccgagacccggtgcatggggtgcttctggtctgagctgaggcccctggaagccacagccaggaggcagcaagggacggctgtcatgtcccctctcccctgtctcccagggtccctgcgggacagatttccctgcctgagcctcctggttgcccataccctggcctcccaaagcccagcctgaagccttaggcaccctacaacctgcttcctctagcagcctgccctgtctcttctctgccgatgttcctgaaactttcctgcctctccttacctcttggccagagagagactggagaccctgtgggaacccccgaggggagggagaaggccgctgtttgaacggaggtggtctttccctctgcccctccccaggcgggtcacacttgcaggcccagcctcctgctgtggcagcgcttggggtgtcggctgcctcctgggcacgagttgggagctgagggaggcgctttcaggaccggagtggcaacccagctggaggaggagtaacaggcccgtggtcagcagcagccgccgcagggaccccggcgctgtacctgtgccccagctgacccctcccgcttccctagggtgggccggggatggtggtctgttgcccagcccaggaagaagaggggccgtaatcagcagcagccacctcaggggaccccagcgctgtacctgcgacccagctgacccctcccccttccccagggctggctgggaatggtggtctgttgcccagcctaggaggaagaggggctgtggcttccactctagaggtctctctcccggtccctcccccggtgctggtctaactgcaggcctgccttaggccgtgccggcacctgctgactgacgcttagcggatgctgataggagagggctgggatggggaagcagcaagtcccggtcactgtgggctcgggttacagatggttgaggcacctcctggccatccccaggaagcaaggccccacgcagcctccgactcacccactgcccgtgtgtatttcaggaggctgcatcccccaaggcccccaccaggtaacttcattgggctgggtgtcgctgcaaaaccacccattgggtgcggtggtcttctggtggggggcatggctggggaggatgcggtggaggagaagccagctccgtggttggggggagggcggactatccgtttcctgtctgtcccctgaactggagctcatggtccctcccccaggtgcctgggccatggaagaggtcacagccctgccttattcctgtggcagcctaggggagccctggccagtcccgtgtctcctgggagggcgacagcctggtcaggctgcagggcaggactggaatgcagacccctgcttggccatgctgttgcctggctgctctgtctggggaccttctgttcaggaagagagaagcgggccggacagcccggctcagtgattggaagctcagctccccatgttcagtccagcaggaagtttgcctcctcggaacacttgcgtgcttctgcatgtgtcttcttggctggtggttctgcgaggcccctactgggctgcgtcatgtcctctggccaccctggccttggtgcctggcccctgtgaaacagagatacctgggcagtcccccacttgtgcttgcaagcctgtgtggcttcagtgatggctgattctgctccacccagaggacctgggaatcctcagcccaactgtccagaggagtctttctcagtggggagagcctgagctgtcctcctggtggacagtcctttagatctcaggcggacttccctgccggccgttcctcctgctgcccctgctcctctgtcccccatctgtctcccaccctctcccctgcagcagccagctggcacggggacctccccttccctctgggattgtgaatgagacgactttcctggtccttctgggtctagatctttctggcaacagtcagtgaaacccttgtctcaggtgggaggagaaggctcagtatgtggtcacaacaacggtcctaaccacatcactctcaaacgctggctttcacttaccccttgccctgcccaacagttactttcatcatcccattttccagattaggaaatcaaggcgcagagagcttcagccacttgcctgaggcccccacagttaagtgtctggatttgaaccctggagcagcctggctgctgagctgtcctggagacggggtactgtgcagtggtcggggtaggggtggagctctgccgtcgctgactcccgggctacctggagtgataacacagcccagtgtctgggcccctgcctgagactttggctggatgccaggagcccgagaccttccagctctttcctgtgtaaggcgccatggggtgaaatgaaagaaaaccccagttagaaggtgtccccctcttccttcagtccctcagctgccctggattttgaaataagacaccgcccgtctgtggggtgagcaggaacagattggaaccgcatttctctccccccagtcacagctgccaggagctcatctttctctgtctcctccccctgccgcctctccccacaagactgggctggatgctgctgggaaagtcaacaggaagtcttttggctgcggtggaggtgggggtctgtgcttccctggggaccgagatgagggctccaggttggctccggcaagagcagggaggctcacgtctctgcctgctggttttgcttcctgtcctgggagaaggtatccacatgtcccagaatgcaccctctgcgtgtacagggatggcttttgggccattcacctgaggtttattgatctttctctttggaactggagtggctcctccacggtggattgggctgagctctctgcctcggccgacgtctttccccaggcacttcctctcaccgtgccagggtgcaggttgctagtggatgggtcttcaccctcggggattggcagctgccacgctcatttcacagtcgagacaccctggccgaaggttctgctaagctccatggagtgtagggattttttttgagacggtctctctctgtcgcccaggctggagttcaatggcccaatgtcccgctcactgtgatctcgacctcctaggctcagcagtcctcccatctcagcctaccaagtagctgggactacaggtgtgtgccaccatgcctggttaattttttaattttaatttttttttgtagaaatggagtcttactatatttcccaggctgaactccaactcctgggcttaaatgatcctcctgccttggcctgccaaagtgctgggattccaggcatgagccattgtgctcagctggggttttcctttaacccttcctggcccttcccaggtgcaggacccgggcctcagccttatgtgttcttgaacagctctgggctctgtcctgtacctcctgggcgcgtggtcaggcctctcgtgacatcagcaggagactcaggtgaagaagcaggcagaacggaatgcttgctcacccagcctcggggccaggcggggcggccaggacagtagcagtggctggtgtggcttcctgggaggtcagcccattggcgtggccagcgaatggggaggggagcttctccccttgtctcccctcatttctggtctctgggcctccagggccaggtctccagagttctaggtggaggatggaggtcagggaagctggggtaagagcgggctgggggtgggtggtcaggcggatcctggaaaaccatcctctgcaggtcccgctttccccagggagcactcagggctggtcccggggagccgggctaatggtcacctcggatggtgcaggggtccatccccatgaaaccgggcccatccccatgaaactgggcccacagaagcttttggttccggttctgttctgccccctggctcttgcttccaaagtaggactcaggatagctctgaattccctgccgaaatgcagcttcctgggccctaacccagccctccagaaccagagtctctggggtgggccctctgcttgtctagcagcctccaggggacacttgtgcctgccagagcaagtctaataagcactgctgtaaacccctcgtccccacagccttctggttcgtctcccttttcctgctgggatctgcatcaggattaaatgccaacatcagggatcaggttatacttgtgaaccctgagacaatacctgcatctttttttttcttgaggctgtcttgctcgctctgtcatccaggctgaagtacaatggtgtgatatccactcatggcaacctccacctccagggttcaagcaattctcctgtctcagcctcctgagtagctgggactacaggctcacaccaccacacctggctaatttttgtatttttagtagagatggagtttcaccatgttggccaggctggtctcgaactcctggcctcaagcgatccgcccgcctcagcctcccaaagtgctgggactacaggcgtgagccactgcgcccggcctgatacctatatcttgaccaagctgctgtggaaacattgagttccccttgatagttttgtccacagagtgaatgtttaggaaccggcgaggcatctctcacccccacccagatggcggcctggaggcagcgtttctgaccctgtgatgggatttgtctctcttgtccaagagactttagagatgtggcccctgaatgtgggggcccctgttggggtgggaacgggagctggccctggccattgtccagtgaccccatctcagtgcctcgatcctagcaccctcgatctcagcgcctccccttccccggctccgcgcggagatcacgtggcttgcgctgagcaatcctccactgcccccgtcgcgttcctgctgcagggaagcctttccagggagccagctgacacatttggcctccattatttgtttttgaacaggaatgaaaggagagagtgagtaagaaagtggcaggaggtgggggttgcagagtaggggaaggtcagagagaggggaggaaagatctggaaagtccaggcatgtgctctggaagcaggtgccagcgatgagctcatctggagggtggccgcccgccctgagccctgcctggggccagcagggaacactctgccagggcatgtcgctgggagcctgtccttggctcactttctgctgctttgagcgctgagcagatttgtttccattttagggacaacgcaaggaggctgtcattccacccctcaccttattaatatttcatgaatcataagtgaccacttactgcgtcctgacgtactccaggcgctgggctcgaagctttatgcgcttcatgggatgtatctgcactatcgccgtagaaaacggttcctgttactactgcagagaaggcaccgaggcacagagaggttgaggaactggcctcaggccacacagctagaagcggctgaccctggctgtgaacacagggctgcttgactccaaagcctgagctggtttgcagcgaggctcatggtttctgtgccactgtttgagcctctggtcgagccccttggctcagtggggggcccagtgacctaccagctgttccattatatgttgtggacacctccacggcccacctgggtgggagggaaggggcttcaggaggtgggaggggtacagggaacacagtccagcctgcttgggcccaataccttgaccttcaaggtaccccttgagggtagcatgaggctaagctcttgttctcctccaggactctgttcctgtgagggcctcggggtcccttgcttttttctgggggccttgctggtcaggatcacagagaagctctttgctgttgatctttctgcctctgtatcttttggcaagccattttatgactcagttgctttgtctgtaaaatgggttgaataacattgtcctgcctcggagggtttttgggaggatcaaatgagacctgttgcacagaagccctttgtaagccatgctgactggcggtcgccgggcccccaagtgaatgggcatccgggcactgagtgtgtggactcagtactcggaaggaggggctggggggtacctagaactcctgggaggcttggacccctgctctgctcagattctgagcttctccttggccagtttaattcccatcagtagggtgagggtaaccaggacttacgcatagttgggcgaagtcgagtgaccacatgtggaagtctagcgtccttcatgcaaagtgggcaggcggccaaagtgagctctgctccagtccccccacccccggggctgttcctggcgccctgccctcccccagagccccactgacctgcaccatgtgacccgggcctgggaagatgggcccagctgtgggaggtcgtgcgggctggggactgagagtgccggaggagggcctcccaggaaaacccagctgcacaggaagccgggccagcggcctccggaagcctctgggctttgcaagctggactccccagatctgtggctgtggggccctctcctgcctgcagctgagagcccttgacccgcacctgagggcttcagaggtccgggagggggatgtgaccgtgtccccagggtgaagcccacccgagtgtcactctggatacagccctcacctcttcctggccccctctctggtcatggggacgctgcctggggggggttcccttacatggaaggagctgcagctgagctggcgggcctcgcacacccccaaggccgcctgacttccagcctccaagtggggttgcattcaccactcaggacctggagcctcagccagagagggaccctccactgcctctttctctgtctcttgggaaaggtagggtctttgtgccccctcccacccagggacctggcatgttgggaggctaagaggaagctgccccccgctcatctaccccccaaccctcccagccagcagagttttacctgtgtgcttagaatctgtgcgtggagccagaagtcacaaggttggcccagctgtgtctgaccctggttgtgcggtcttggacagtcccagccctcctggagctgagcatcctgatctgtagaggagaggctgctgtgccggccccgcagggccctgtgcagaggggagtgtgtgcggctgtgagttcaggccatgccctcagactggaggataggatcggaacagtgggtcaggatggccagagggtcccagcctcaggaggaggcctccacacctcccagcacctccacaccaggaaatgcagccaggcccccaggcctcccatgtcaggaagcagcaccccgccccccacctctggttgcctgggcctgagaagttgagcactcctcccgaatccgagtgccctctgacccctgcttgggtagttgtccctcctgaactgaccgcctgtcctacacagtcccctgtggtttgcccgacagggtggccagcgagtcccctgcacagcacacctcccccaggagtgctgcctgtgatgatggtgtaaagggtgcccccccgagcccccggaggcatgcagtggcgcaacagcgtgagcccaggagccccggtgagctcctggatggagaatctgttcagatcactccccagcctaaaccttccctgggtgtctgctgtgcttggggcgctgactcatcgtggggcggcctgtgagaccctacgtcacctggccactcccctcagcccctgttcactgcaccggtcccctggcctggctgctcctggaacatgagggctcatcctcacggaagaatattcacttgttccctcctggaaagtccctccctagacctcctggccgcctcattcaggtcttgctgaagcgctgccatcttggagaggcctccctgtcacccgcagttaaaacagccctcccatgcctgtgggtggctttctatggggcatggatgagtattggagagtcttgccgtttatttgttcatatgccctctgggagggcaggggacactgacttgtgttgtgggtgccttgcatgtcacgggtgctcagtgaatgcctgttaagcattaggggagcacaaaggagggaagcctctgtccaactggagcagtcagggaagacttcctggaggaagtggtatctggtctgcttagaatgtggcgatttgtctgtatgcagacattagattagagggcaaaggccattatcataacttagcagacagctacaagcagctaaggaattgctatgacatggactgctcgtgattggagctaagaaggagtcagagacagaggtccctgtgctctggcgtgagtccttgggggaggctgagctcccagaatgtggggccgcctgtgcagaggccggaggtgggagacacacctgtgagtgccggtgagtgtggggtgagccactggggctggatcagaagatgggaatccctaaacccaccaaccagccttggtgccctgggagtgacaggagacggggcttctgggggactaacccagcacaagtggacgagatgggatgcaggggaaaggacaaagctctctgaggctttgggaagctgagttagggtagagccatgacagggtgagttccagaagcaacacaagaaaaaatagctagactgggttttcccttcactgtgggagatgccccacctcacttcccccgtcctccgggctctggcaatgggctgggcacagtgaatgggttccatctgcaggagtggtcacaccccttgggcacagctgcctcatacactgtattgagatgggatccgaggccgggaagaacagcttcttctgtaggttgacattgtcagccttcggggagggaaggacggcagggggcctggagcatctccttttgccatccacactctgtgcctgcctgcagggtcttgagccctgtctgttctgcctcagtcctggtcaggaacttgttggagcccataggggcagtcaggctggaacaggaggagaccaggccggcaggggagccgagagggggccctggacagcacccagggctgagtcatcctgggcctgcccgacttgctatttggagctgttcccgcttgctcatcatgtgcaaggtcctgatccactcgggtctgtttaaccagcgcccctccccaggcccagttagcctggttttcgttcgattcatttattgtcatcagtgccatccttgcaccacgtaactagcctttgcagcatgccagccaccaagctcagggccctctgtgcatctcctgtaaccctcacagcaacccgggaggcacagagaggctgagtcgctggcccatagtcacacagcaggtatggggcattgccaggatttagccggatctctgactccagggcctttccagggccttgggtgggacactggcaaggaagcaaggtatgaacactggccctgccttggacagagctcggggacggtggcctggcaggcccagctgacacagtgaccctggtgcaggttcaaccattggcaaagtgttcaagtacacacagaatctcaactggggagacaggcgaagcggtcaagggagggctgtgagtgacaggtggacactgtacctactggcagatcagctgaccttggtgccttctggagcctttcaacttccttatccagaaaaagaggaactaacagttccacccccaaactgggtgggagtaccacattcgaaattgaagcaaagctggtcgtgtcacaggctcggcagatgttagctgtgcaggcaacttagtgaccatttgaagtaggctgtgcggcggcatcctcatcttgcagatgtagtccagagaggttagggcactaaccctgggtcacacagcgacagctcaggctacagagagcagtgctggatgggagggtgttggcagcttcaggcacaggctgggagggctgtggggtcagcagagggagggcacacttcccagctggtggggttcccttgtgcctcagtactcatgtgggcccaaaggagctggaaggagggaggttagagccacccatgggttcagaagctgataagcaggttattgactctgaatttgcctcatcgtatgtaaattggggacaaatttggggatttaatgatataatgtaagaagcagacatgtcacagccctggttatacagtcagtgtataataagtggtaagccgtcagaggaggcagccggtgagaatgggagcatctcagcagccctccgccccctgctcctggttgcagatgtacctgttcttggctatttgtgccccagctccgtgtcctccggtgtgtgtgaggccaagctcctggggtggggacttgggggtgtgtctgcagctcctgaggccaagaccaaggctgaggccgaggctgaggctgaggccaccttggtgaggaggaaattgcaggtggagaagctcgttgaccgtgaccttgatctgaccgtaattttgatggtgccgatgccgtcagcacgcaggcctcctgccctcgccacgactggctcctgcagcccacctggctgagaggtgtgctggctctcgcaggttgcaaaatggggacatcaccgtccgcctgggctacagcgtgctcgccgattgcatttggggagggactgagggctgattgtgttgtggggatgttggcagagaatcagagagggcatccaaaaaggccaacagttcggtggggagaggaggcgcaaggctggttcctgttttctgggctttgatcgaaagggaacaggggacacatctggggacagtctccttcctggaggaagaagggcttagggtgctggtgtggagtttgcacagatggggataatgagctggagggtgctgggcaggagctggccagtaataggctgacgagggaggccctgctggctgggcctggttttcaagtgagcatcctgagctgcggggacccagggggtcttagagacctcagagctgagactcgggaccacagaggggtgggctgtgctcagggcaacacagcggatggggcagatgttgcgaaacctgtctctctgcctctctttctcctgctacagaactggatcctcccagctcatggctgtcaaatcctttagatgcttctgggttccatgggcgccttacactggcttccctgtaggacagcagaccctgggggttggctctgatggtattcaccatggggtaccccatgcaagcacagtgctttcacgcccagcctcccagcctgtggagtaggcctgtgtctggccagcctcactttgtggccagaggagggagacagtggttctggagacaggagctggcctggggctgccctcccagcccctgttctcccagctcatctccttgccttgcgggtgctggccaccctccccccgccagctccatccccagctttctctgcccgagccgtgacctgtcagtagggggcagtggaggccttgaaagtccttggagaggactttgaagcagtttttacaaatctgtccctggaaagtctctcctgtcacacccccagcggctccctccctcctaacatttttcctggggttgtcatgcagcggggggtggaggaacccactaggccgtggatagagcagagccatgttgacacaaaccctggctgaacccacatgctccctacagccagcggccgatcactggaaccagggaagtgacctcatagcaagggcccgcagagcagccatcacgcattcccgatcttggtttctggacccagctctggaaaagaagccagatcctagccacttggagctgcctagggaagaccccagcctggtgccggctgacagctcactggaacttttcatctgcttggccaggtgatgccaaggggcagaggttagaagtgctaagaagcaggccgagggtggtggctcacgcatgtaatcccaacactttgggaggccaaggcgggtgaatcccttaaggtcaggagttcaagaccaggctggtcaacatggcgaaaccccatctctactgaaaatacaaaaattagccaggtatggtggtgcacgcttgtaatcccagctactctggaggctgaggcaggagaatctcttgaacccgggaggcagaggttgcagtgagccgagactgtgctactgcactccagcctgggcaacagagcaatactccgtatcaaaaaaaaaaaaaagaagaagaacaagaagtgctaagaagcatctgtcttcctgattgaaaagcaatctttgctgggcgtggtggctcacgcctgtaatcccagctttgggaggctgcggtgggagagtcgcttgaggccaggcgttcgagaccagtctgggcaacagaggtgctaggggtagtggcgcttgcctgtagtcccagctcctcaggaggctcaggtaggaggattgcttgagttaggagtttgaggctgcagtgagctatgaccacaccactgtactccagctcctgggtgacaggatgagaccctgtctcaaaaaacaaaacacaaacaaaaaaccaacgtttatcttttgtgattttaaaaatcacacctacttgtgacaaaataattaaattagaaaatgtaaaggaaatgatcaataataattgcgtcctccagacaaacactgttaacatgttcacgtttccttctagtctttttctacatagacactcaatacttattaatttgttttgaactaaagatggttttctctgctttgtatgagaaccacctcagccaggcacggtggttcacgtctataatcccagaaagctgaggcaggcagattgcttgagcccacgagtttgagaccagcctgggcaacatggcgaaactccatctctacaaaaaaacacaaaaattagcctggtgtggtggcacatgcctgtgctcccagctcctcaggaggctgaggcaggagaatagcttgagcccgggaggtagaggttgcagtgagccaagatcgtgccactgcattccagcctaggcaacgggagtgaaatgctgtctcaaaaaaaaaaaaaaaaaaaaaaaagttgccacgttgtcacctctctcagggattttcatcctttctacttttcgcccaagacttgccctgtaaaaggatgaggccaaatagccatgggagggtggtactggatgttcaaaaaaatgtttcgtggctggcgggacttagaaacaggttggggaggtttcagcagagggtggaccccagctgggggtggggggcagcaggggggcccctcacatgctctctctgcgtgtttcatggggctgcctgtgaggccgtgtgaaccagagcccggctgggaagccacatgctacctggactctgacctttcctggcagcatgaccttagccaatacgctcaactatgttcccctctgtaaaatgggctaatagaaatgtccactcgagacatgatgagaaacaaaggtgttcatagagcaaagtgcttagaacggtcctggcatgacaggagcccacatgtcagtgctgccgttggcatcgtcatcatcacggcggcattggctgctttgtttctcccttgtccctgtcaccttcttccctcagcaggctctcattcacttgttcatttattcatggccgaggccccgtctgtgtcaggcctggtgctgagaacgggggtagagagatgggggctgtgccctgctccctgacccaagggttccctttgcaatgtgaagttcttggagactggaccctcaggctgttccaccagcccctcctcaggccagcttaacccttccgtgctcgttttctgagctgttagaggaagagagcgggaggaaggatggagtggggtttttgtggggactgagcggggggtgtgtgaggccctggaaatggtgcctgcggcactcacgcagcattagcttttgctgcagttgctgtttggagaatattcttggatttcaggacactgatgacagaaggtggaacgctttttctggaagccatcaagaggggaccaccgcggcggctgagcagagttgctgacttgtgagctgtggcctgaccacagtcactgttctcatgagcgaggccccctgtggtccccctcccaggaatttctggccccttggcaggggacagttcagggctgggggtgggtagtggtgtctgcaggccctcttggagtcagagaatcccctgtcgccgtggcggggctgttccctcctgcccctcccctcccgctgtgctctcagctgctccgacaggatgcttttggcctgagagacagaaaccccaactctgaatggcttcagccctcaagagaatttggagcttttttgtgcaaaatgagatgttctgagcatcgaggatgctgtgggggatcctccatcccaccatctccagccgtggtgtccctctcggtcacaggatgctgcagccacgttgcagggaaggagagcctcccttcctgtgagcctagggagcccctccatgcagccccttcactggccattgcctgagacccgacctggtggctcctgccccaaggagcagaaagggggttcgctaggtcagggtggggctgggtgcgaggaccccccccggccaacagggtctgcttaggtgtccgtcctgttggggcagcagggaagggacccacatgtggcactgggacacggagaggcttttgtgcctgtgacggccaaaagggatggcgccccagccacgttcccacccaccccgaggcccagcatggccatgccggaaatagcagcatcgtccccctcactgtcctggcttgctttcaataggccagaggggtggggctggagcgggcgtctgacctgtggctggatctagctgcccgtggacaggctgtgagtgaatctgcagaggaagggagatgggaatgccgggaccttctcctgcacctcccgaacccccgttccctgtgagttagatggggagtgcacccctgccctcccctcctgggtatcccctgcgccccccgccccaggcacttgatgttgcctgttcattttccctctctgcccctcccgctggcccttcccatatggtcctaattaggaccttccgcccgttggtggatgggcagagaggggagcttgctgtggggcctcccccgatcgggggacttcccagcacagagctttctggcctctgcagggacgctgtgtgtgcctgtgtgagtctggcgtgttagaagcgctaagctgcagctgttctgtgcgtttttcacatttctcacttctcaaaggccctgggtttggtgtctgtgggctggggatctgtgttggggtctccaggaggcccttggtgggagaggcagggccccttcccctttaatctgggcaaccttgctttggcctgctgtctgcggaaagtgccctaggatacggtggcaggactggctggggttctggctccaggcccagccccagcccctgtcagacttaccctccttgtgcctccgttcaccctgtccacccgcagggcctgcaggagcatcctgagagttggtagggtggcctgcccggcgtccgcacagggtctgctggtgggtggctgaggctgcggtgaggtctccatggctccctcgtcctgcacatccttcccttgttgtgttgtctcgctagcatatgagcccgtactgcctctgagtctgcagcctgttttccttaccaggtggctaagcagggtggcagccagggtggcagagtcccattggcctgcaggggaccctctgtgggctgcaggtagtcccctgtggttgaaggtgccctggcaggacctgcaccatgacccccgtcaaagctcacgtccaaggcatttgtgggcacccccgccccagacgtgagggttggcatcttctcttgcacgtgaagcaaaggcctgtttgaaggagcgtgtggaagcctgggtgtgatgaaggcaaggaccggtggctcacccctcttgcacctggaccttgggtggcaggcctggggccttcagtccttaattcaggagggtagccagtcgctggaactaagagtgaacttcagctgttgttgccatagctggagggaagaggggaaaggaggcgctgcaggggagcagagacctcacccttcctctgccgacatcaggctgccggtgctggacggggccctggcaaccgtggcaggagtggtgatgtccgatgatggtaacaagggcttcctgaggaccccgagctgtcttaagggctctttacctggagtaagtatcccctttaatcctcccaacaacactgtgaaattgattctgttgttattcccatttcaccgatgaggaacccacagcccagagatgttaagtaacctgcccaagcctccctctgagcatggcagagggagggtccgaatgcggaaagtctggcttcagtgcccccatccctaaccactgtcatttacctcttcggccagccctctgattgcaaaacctgaggcccagaggagtgcagtgacttggccagcttcgcacggcaggttagtggcagagctgagcagtgtctcccatgccctgattctgtggcttcttgaggtggctcacccctaaacacgccccccatggtggctctgtttcctcctctcctctgaacctgccagcctgtgctcaggcagggggagaagtagagcaaccatgccgggcgggtcgtcgtgccccagtgccgcctgccctacacctgattggcagcagagtggcccctccttggtgtggtctggaggtgccagtggtcactcatcagcacagcccagtctcacacatgtcactcccaaaggatgttgacacagaatgaagcagctaggggaggcggacgctttggcacgagggtggcgtttctggtaatccgtagtgctgttgtctgtggctgcctttggctggcatctcacctcctcctggctgtcctgcagccacctgagggaggtcagcatgtcgccttcatcccaggacagtgtgaatgcagcagcgcaagcttgccagcgccgcactgcgggatctggaggcctttgctcctgagccctgcctctgtgtaatccctaaagcacggacttcttaggggcttccattcctccacctggaaaaaccttacaccgtttagggcttgaggcagggctagagcatggagacgttgctggaggaccaagggagaactgagcgcgtgttctcttggcctcagcctcgtgtgtgtgtttatgcatgggtactttgccatccacactggcttccacggctgggtgggagttgagttgagctcggcggctgcctttccaccctgcgggcctggttggggagtgtgaggatgcctgctggaagccaacgtgcacgaaagagttaatggtggatcccatttcctcagccccctctccagctttcccagggaaagggcaggaacagagaggccttatcttcagaggaaggggtgggcggggacacagcgctgttcggcacagtcccctctgagccaccctgcatgtttcattccaccgacttctgcagcccagctgttcagagcggatccagaaggtggagagagggtttccaataagcagaggatggagtgaatgtgagattcattactgggatttggcaaagcaaagagcctcactttctccccgcagatgggacgggggcggggctggagccagcggggtgggggtatccagcaagagctccttcccatcctcccacttcctttgccatgggccccctcctccacgcagaccctcagcctggaatgatcagtgtccagcttttctcgcccctctcctgccccgctggagggagtgacctggcccctggccccggccacctacacctcctgttttgctgcactagcctcgtggtaggggctgcggcggaggtgggcaaaagccgcttccgggcagccagcccccatcctgggagtgactgaaagtccttgggggttcctgcagggtgagctgcccattctggccctggtaaggacacccaggagagggccagggtgcctgtatttggggcacagcataaagaacagccgtaagtgtttctcaggcaggagggtgccgaagcattgggaagctgggatttagaagcattgtttggggtggtgagtggaagatgcaggacacagattcacgcgattgtgcagatcacctggcctcactccctcggtttacagtggaggaaactagaggccgagagaggtgaagtgagttccctggggtcacacagcctagccaggcccagggcgccgacctcctgctctgccttcccgtgcccattcggttggcatcagcatccctgccttgacacccccgtgtggcagctgctgtgattctgtgactcctcctcaccccaccccagtggggccctgcgagggaaagaagaatgccctatgcagaagtggttggaaagcaagaagcctggagagaagtgaggcctctgtggtttggcctgagtccaggactcatggcctggttcccagggatggagcaccgacccctcccttctacacccccaccccacgcccccaggagctccctatggggaagccggaatggacctgggctcagagattgtaaattcatcttgctggatgtgtggctgcctttatgtaaccaactctctcacggagaagccaggggatggctctcagtactctcgggggtctctcagtgaggtgggaggacctcgagaggtcaggaggctgctcaagaccttctgcccctcagggaccaggtgagggcttgtcgactgctctgacctcctgatgcttctggtggggagacctcagaggggcctgccgtcaccatcgccagtggccctggcctgcccagtcatccttctggggtggccaaactccatgctgcaaaagcccaagtgaaccccagtagtggcctgggagaatcatctgtcacgagccaaggatggagtttctggggaggactttctgctgccccccaacccctttcgggtacattctcctgtagccccactccctgtaagaaagtcaggtgcctcccgaagcttctccctggccccaggccagaggtgacagtgggggccccttgcttgcgctggtgactgtggctggttgttggtgcctggccctgccctgcactgtgcacccattgaaggcggcatcatccgggcctctccggtggccatgcatgggtgagcagcccacgacacatctgcttccagcatcgtgtgggccggggctttcagaggggctgagggcttggatggccctgcaggggggtgctcctggccttgtgaccgaaaggagctgaaggtttggagaagccgttgggccgaggtcagttcttatagatttggcgaggagggaacagatgctcacggagctgctccaggcactgcacacactgcctcactctgcgctgacagccaagaggctggttccccgccgacccccattttacagataatgtgctcccccagttccttagtggtggagccaggattcgaacccacgcaggcagcctcctgggcctgtagtcctacccttcatctccctccaggacctatgtcttggggttggcaggataatgactcccagagttgagcacatcctaatccccagcacctgggactacgttaggtgacatggcagggccagctaaggtcactaatcagctggtcttaaaatagggagatgatcctggatgatccacacgggcccgctgtcatcacaagagtttttaaaagcgcaatagaccatctgaggggtgcagtgggagaggcttggaaggaggaaggaggccacaagccaagaaatgcaggtgaacagaaaatgcaggaaaacgcagtctcccctgcagcctcgggagggtgcgcagccctgtggacaccttccctgtagcctagtgaggtggagtgtgggactaatctgtgttgtttgacatcacaagtgtgtggtcatttgctacagcagtgatgggaattgaatgccattaggcagcagtgcttctatcccggaagaattaggataaattcccctgtggatctcaagctctgggagattctgggctcctctggactgctccagttctgcaatcataggaaaggtctcccatgtctgtttgggagaagaaaaccccgtagcaaatccatttccccttttgacaaatgaaggcgagggtgtgggctggacacatgtttcctttttgtggattttttttgttttaacacttagaattctgtagctgaaggagactttggggggttgtctgcctgatttgcaagtgaagaaatggaggcccagggaagttaagtgactggcccagggtcatgcagagtcatgctggaatatcaagctagatagcccagttcctgctccaaagtgctttcctccctggttggggaggagggttggagggagtggaccccgagcaacagcagcattggcaggggttggaagagtagctactgtatccaggtgctggagcctctggccacttcctgcaggaaccaggtgacccaccatggcacaggcctctccctgtctatctgcagccctgggggccccagggaccagaggacactctggcctgagggctggggcctgagagaagagatggaagtacccctagtctggcctgcccccgtggcgtcctgcaggcatatccggcagcccaggggtcctagagaacttggctggtgggcgtccccaccttgccgcagctgcaccctgtggccagcagcttgcaggacttgggctgttgcctgtggccctgaaacagtcattttctgagctgagtggggatcaggtgagcagatccccacaccttaactgctgtgatctttctgtcctggaggctggtgggcagcctggttggtgcttcatggcactttatgaccggccctgtcaccaggctcgtgagttgctcccctcctttcgggcatcctgaacggcttccctgagagccccgccctgggccttcgcctctgcaggcccccgctgcctggggcgcctccttcccctggaagctgggcctctttggggactcattaagaagggccttgccgagtgctgccaaattgccccatctggtccccatttgttccacttaccaccctattttaacttttatgtctcctccttggctctaagatctgagcaggcagggcctgtgaggcaccccaggtcccctgatgctgccagcacccaggggactgttagtacatatgcagggagggaaggaatgaaggaagagatgacttggggagtcctccagttcccatttgtaactggcacattgcgacaaaacactcatggcattttacctttttcatataccttttttttaaatttatttttatttgagatggagtctcgctccgtcacctaggctggagtgcagtagcacaatcttggctcactgcaacctccacctctcgggttcaagcgagtctcctgcctcagcctcctaagtagctgggattataggcgcccaccaccacgcccggcgaatttttgtatttttagtagagatggggtttcaccaagttggccaggctggtctcgaactcccgacttcaggtgatccgcctgccttcgcctcccaaagtgttgggattacaggcgtgagccactgcacctggctttcgtatatctataaaagagaatttgcccagaaaatctttcagatgcacctttagggttttaaggcacagatacatgaagcttgtcagtgagcagctgctgcttattcctttttctcttccaattcagagcggcctgcgtcccaagcggacagctgctcccttcctcttggctccctgctgcccacgctcccacagaagcagggagaagaggcaggaaggtgacgcgtgatcatccgctgggcgcccgcacagtgccgtctgcacaggtgccatctcctttacttgtcactctcctcgctgagccctttcccctttttgcagatgagagagcattgcctcccagaggttaagaaatgggcccagagtcactcagctgatcagcgtgcagccagatttgaaccacatcctgctgatctccatgcctgcaggcctggcctgatgagatggacagctgggtggtggagaccttgagaccctggatggctcccaaatagggcctgtagctcctggacagggagagtctggcacaaagggtttgtggagtgagctgggggagaaggtggcttagggtccctgtctctgaacaaacagatggaggggctattccagcgttttctcagcctctggtgtgctgggctcctggttctgggaggagagaatggagctggcctccattctgggctgggctggtttgggcccaattcagacaagcttcttagtttgccatgagtgacacttttgcctgccctggtgtctctgccaaaaatatgaagggtttcagaacccccaccccggcctgcttccctcccagacttggagtgggtctggggctgacaacagtctcatgccagatagcctgagcagccaccagtgccatcaggtctgacactgcggcccctgccccggagggaaaaacaaggccctctctgggggattttctgccagcttgtgaaaacaggcctggagtcagccagcgcccccatgcttagacacttcgtgtggttttcaaagtgcttttatgttgctagctcatatgatcttccccaaaaccccataagggagggcaggaagtttgagcaacagcctgtcaagcacccatacagcaggtggtttcattgccctccatttacagacaagtaaactgagcttcagggtggctaccgcttgtctcccaagccacccagccatttagccacggaagaggtcatgactttttacaccccagtgaagctgaagatttttctttccgtttttaaaaatgtttactccccagggcagtgaacacctggtgcctctgtctagcgcaagaggtgaacgtttgccacttccgtttctttcctcctaccagacctgaccctccttttgtgacgggaacatcctgcaggcagtctgtcctgctttcatagactttgagaaacggggtccaaattgccggctgtgggtgggacaggcgacactgcagtgaagaggtggagtatttttgtagcggggaagaaatacatttcctctaccctcttaggttcagtgtttgggggtctgtgaattaaactcactcaagataaattaatgagagaaaagacagatttaatcacatacgtatgggatttcactgaaaaacgtgactcaaaagagcaggtagaaggtggggcccgtgactggtccgaaggtagtgagttatctcagttgattgttcacagtcagttacagattagactccttgttccactgtctcccctcttcccacttgttttgttttttttgagtcagagtcttgcactgttgcctgggctggagtgcaatggcacgatctcggctcactctaacctccgcctcccgggttcaagcgattcccctgcctcagcctcccgagtagctaggattacaggcacccaccaccacgcctggctaattttttgtatttttagtagagacagggtttcactatgttggccaggctggtctcaaactcctgacctcgtgatctgcctacctcggcctcccaaagtggtgggattacaggcatgagccactgcacccagccaactagtcttaaaaaaaaaaaaaaaaaaaaaagaacttagggcccgtatactatcttaataggaaaaaaggaaggggtgaaagcacatattatgggccgggtgcgatggctcacgcctgtaatcccggcacttcgggaggccgaggcaggtggatcacctgaggtcgggaattcaagaccagcctggccaacatggtgaaaccccgtctctactaaaaatacaaaaattagccgggtatggtggtgcacacctgtaatcccagctacttgggaagctgaggcaggagaattgcttgaacccacgaggcggaggttgcagtgagctgagatcataccattgcattccagtctgggcaacagagtgagactgtgtcttaaaaaaacaaataaaaaaaaaaaagcacatattatggcaaaacaaatgagtttttggaaagataaataggcccttaggagctgagatgggagatgtgaagtcttgtgacaatgtcttcttaggtgtggtgtggaaactactcacatcttccagggaagagtcagttgctcccagggagcagatttgggcctgtataccatcttaataggggaaatggaaggggcaaaagcacatattatgggctgggtgcaatgtgcccagtgcaggaggcagacgtggtttatggttgctgttgaaaccagtgcagggcccgattgctttgtattgagtgttgaggatcctggttttgtatcagccatgagtttgcagctctgggacacacttgatgttggctcaaggggaaatgaggttggaggggcagggtggttggattggatgtgggcctggggccattgctgatctacaaagtggtcatcacacgggaataatagagctggctacagaccacaaccagcaatattatttaaaagtaaggtcacacttttaataataagtcacattttaagttattatcaatttataaaacacactgttggtataatgatagcttttcaagaaggatataaaaaggcatgttgggctgggtgcagtgactcacgcctataatcccagcactttgagaggctgaggtcggcggatcacttcaagccaggagtttgagaccagcctggccaacatggtgaaaccctgtctctgctaaaaatacaaaaaaaaattagcttggcgtggcggcgcatgcttgtaatcccagctacgggggaggctgtggcagaagaatcacttaaaacctgggaggtggaggttgcagtgagctgagatcgcgccactacactccagcctgggcaacagagccagactccgtctcaaaaaaaaagaaaaaaaagaaaaaaagtaaaaaggcatgttgaaggtacctgcttgtggaaagttgcaacttgacgggaggtagggcgagcacttcttagaaaggtggaaatgggccctcctgctacagagacccacaaacatagactgaggcctgcagcctaggagactcaaaagaggcaaaggtgaataagagtcaaggtctccaagtcagggtctgactctgggggtgggggtcacatatgatggaggatgtcaggagggcttcctggaggtggtgacatttaccaggggggattttaggtggggtttgcgagacagtaggacctggctgaagagcgtaggctccttagacaggagtgggaattcaggcttgaaaatgagttggccagattgcaggggtcctcgaatgcaagggaagaatttcaactttaacagaggagcctgggaagctgtttgggaaaaggagtgataaagcgggaggggtcctccagcagagccctgcatgggcaggagggagcgagatgggaggtgggtgttggtaagggatgatcccagtggtccaggggagcagtcatagggtggaaactaaccttgtggggtctgggcaggaagggactgatttgagacaccgggaagaaacagccagtaggactttggtgagagggctgggggtcggggaggggggtgtggagagtgggagcttgagtctctgaaaacagacagtgttccaagggggagacctgaggcaagatgtggagaggcagctgagctgggaagctggaacggaggtgtggtcactccaggagactaagtcagggggcgaggggacccttgggagctatctagaccccagcactagggaatacggaggggagaaggaggggagaagaaccagctggtgcgtgtcaggcactgccctcgaggtcagatggggtggggctggatactggccatgaggattttttcaagagctgggttaatagtgagacgggcggacaccagatggctcgggctaagaagtaagtgggcggtgggaagctagaagccgtggtgtagacctactttgagaggttgggctgttcagacagggagaaagttcacagtttgaggaggtagataggtcaaaggaagagggtttgcttgtttttgagattggggcatcctgaacgttctcccaggccaagtgagaagaaaccagaagaggaacatgtcacccaaatgtgctgaaacagcccagcagctgcgctgcctcacagaaaatgtgcagaggcccctctgtcccaccatgcctgcctggggacggccttcactcgggctactcagggtttccccagcctgccaacccaagggtggcaggagctgtgggtgctcccagccccttctcaaggttggtctgtgggtagaaatgtgggctgcctcggggcgtcacagctacaaatgcataccagccctcagaaccacattcctgctccccagccctttcctccgcacccccatgcagaagcgcggccgccagctcacaaaggatagggagggatattgctcttggcatttgatgggaagcatctgctgcatcccattggggtgttgcccaggatggattggaaaagagttggcaggaaggctgagctctgtgctcacaacctggcttggtggtggccgaggagcttggcaggagcagagtgcaggacctgggaactgggggttggtgcatgtgtgcacgcacgtgtgtgtgtgtgtgcgtgcgtgctgggtgggtagggaggaagctgtgaaaccacatcccctcctctctgctgctgtgttgctgtgtgtttcagcagcacgtgggtgtcaccacacttcctagcaggtgtcaacctccaagactgttctgggctcttctcccagttggctgagttggaggtgggagtcccaactgtcccctgtggcttccagagtgggaccttgctgtgggataggctggccaatggtgctccctcccctgtgacccttctgttgggtgggtcacgaggaaggactgtgggtgttgcccacagacaggtggacatgtggcaaggacaccttgggaccttctttctgacgccccttgaagggggcactttctcagctttgagatgagtctctgtggatgtgggaagttcactatctcaagagcagcagccttggaaaatccaacacagaaccccgagtaggggcgggaaggggtcctgtcccgctcactggctgcctggcagagttctgcacaaggaagcgcctgtgttgctgtgggcggaggaatggactgagggctacattcgcttcctgttgccgctgtaactgcttatcacaaactcagtggcttaaagcaacagaggctccttcctttacagtgctaagggtcagaagccgatcagtctcaccggactaaagtcaaggtgttggcagaatccattcctgcctcttccagctttgggtgggaggctctgctggagttccttggcttgcggctgcatccctccagcctctgcctccatcctcctacagcctcctccttctctgcagtcagatctccctctgccttcctcttttttttttttgagacggagtcacccaggctggagtgcagtggcacaatcttggctcactgcagcctccgcctcctgggttcaagcgattctcctgcctcagcttcccgagtagctgggattacaggcatgtgctactacacctggctaatttttgtatttttagtagagacagggttttgccatgttggccaggctggtcttgaactcctgacctcaggtgatctgcctgcctcagcctcccaaagtgctgggattgcagccatgagccatcacacctggcctgcctccctcttaaaggacgcttgtgatttggggcccacctgggtaatctcttcatctcaacatcttcagttacatctacagagtccctgttgccacatgaggtaacacagtttgggaagggagagttattcagcctaccctaggggcctgtggtgtatctcagggcccttctgattttaagatataaagcaagaaaacaaactggctcaaggggaaaaaaggacacgttgaattctgttgctttaaatgtatatttttttattgtgctaaaatgcacagaacataaaatttgccattagtaacactgagtacattcacagtgtcgtgcaaccatcagcactgtctagcgccagaactttttcatcaccccaaagggaaaccccgtatccatgaaggactcactccccattcgccctctccagcccttggcagccaccagaatgctttctgtctccataaattcatttttaataagtgcaattctgtgtgactttaaaataaataaacatgagcacgatgagttgcttattggaaggatatccatgcggggaggccggcgtgtggagtgcgtaggcctccggacgggcaggagttgaaggggcgtggatgtgccgccctctcctccccttgctctttccttggggtcactgcctgagtatccctctttgcaaatggccccaaataatgtctcagcccccacgtctgcatcgcctcctagcttcaggaccctccaccaaaaaacattccaagcttcagactcactcctgggaaaattccaatggcctcactctcccttttgagccagccagatcccatggcctgtggcgggctgcctttgagtcctgagcacctgtgagctagggaagcaggacaggcacacccagggaaggggaagagtcgtcgtcagtcacagtaattgatatctttggaatcgtctaagagatacttagcgtgtgcctaaaacattcatttctttttttgtttgttttttgagacgaagtctcgctctgtcgcccaggctggagtgcagtggcgtgatctcagctcaccgcaacctcctcctcccgggttcaagcgattctcctgcctcaacctcctgagtggctgggactacaggcacacactaccacgcctggcgaatttttgtatttttagtagtgactgggtttcaccatgttggtcaggctggtcttgaactcctgacctcaggcaatgtgctcgccttggcctcccaaagtgctgggatgacaggtgtgagccaacacacctggccacattcatttcttaggagaagctctgcattttctgaaagtgaaatgtccccaggcgggtgacactgatggtgggatctgtggcctcaccagtgtcttatgagagatgccgctgtgtgtttcaccaagctgtatcctattgtcctctaaatgtggcttgtagacatggtgccgagaatgatctgggaggttcaaatcataatatggtccaaatcaacagctctctgatgacctggtattatcctaggatcaaattgagactatccgaggatgggcgtggtggctcacgcgtgtaatctcagcacttcaggaggctgaggcgggcggatcaattgaggtctgtagtttgagaccagcctggccaacatggtgaaaccccatctctactaaaaatacaaaaagtagccgccggacatggtggtgtacgcctgtagtcccagctacttgggaggctgaggcgggagaattgcttgaactcaggagacggaggttgcagtgagccaagatcacgccattgcgctccagcctgggtgacagagcaagactctgttccccggcaaccaaaaaaaaaaaaaaaaattgagactctccgagctgcactgtccagcatgatagccactggctgcacggggccatttgaacacctgaaatgtggtgattccaagtggagaggtgccgtgtgtgtgaagtgcactctgggtttcagagtcctagcaagggggaaagaaaagaatatcaaatatctgtcatttttacattgattacatgttgaattgataatattttgggctctgttaagtgaatgatattaaaattaatatcacctgttcttacattttttaatgatttcctttttcttttcttttctttttttttttaaatatggggtctcacactgttgcccaggctggagtgcagtggcacgatctcggctcactgcaacctttgcctcccaggtttgagcgattctcctgcctcagcctcccaagtagctgggattacaggtggctgctaccatgcctggctaatttttgtatttttagtagagacagggttttgccatgttggccaggctggttttgaactcctgacctcaggtgatctgcccacctcagcctcccaaagtgctggtatgacaggcgtgagccactgtgcctggcttgttcttacattttttattgtaggtgctggaaaatgtaaggttgcgtctgtggcccatgtgccgtttctgctggagggttggaccgagggccagccgagaaggctctggggctgctctacctgaatgctgagtgtgtgctgagcggtagagaactttgagaagtgctgaaggacagaggctttgtgtgggggatgcagccccaggccggagatgccttctctgtgctctggagaccctcatttggtgacagcaagaggaaccactgcaagaggggcggccacctcagcaaagcacccaggatgctggcctcccagctcaggaatccagaggcagaggaggggaggaggctgggcttggaggagagcagggtcttgggccctgggaaaagcctggggggccagaaagctgggggacagattgaggccagaggcaaagagaagaaggttcggagaggagggccaaggaagaagggttctgcccacggggagggagaggcccacggggcaggggcgtggtgggagctgcatcctcgaggctttctgttgaccctgacacctggccagaaaggagttccttctggcatcctttgtcagcggtttctggagctgccctttaggggccagtgatgagggtgccctgggctgggctgcagacagtggaaaagacaggctcttctcactcccagtgctggggaaattagcttcttggaggaagggggagctgtattttctgagtggccgcacttcctggcctagacgtgtgtgtcttgctgtaattttggcgactggtgttggtggtgcccattttatggatggggaaggtcaaattccacagatattgagtgacaggcccagggccttggatttcagtgtttgactcagaacccaggtctctgatctgccaccagcctccctcccattcagatgggaacagggactccgggcatgcagtcttctcccagacactcccccggctctggcctggcgcccggagaccagtagcagcagctccccacggccgttcactgtgagggtggggagggccgtgggaccaggaggccttagggggaaagttggccatgaggagtgggaagcgacgggtcagatgccagtgactgctggctggggagccgctggacgtggctggcctgtttggccagtgtggcgggtgccccggggcttcagtcacccccagccacgtgtgggggtgcgggatgggaaaggtaagagtgtgtggagcccagtcagcactcaacatgaggtcccgtgggggctgcctgagggcgtagcttccagaattcagcccctggccctcagaaggtgtcaccaaaggcttctttccatttgagtgaatccctcccagcccccagcaagccctcggaacgagcccactcccaggcgctctctcctagtgtgggagtggccacgcccctgctgggagtgactcacttgggttcagaggtcgtggcactgagatgggtctggcagatcccagcgtccaggcccagcccctatagtgtcagctccctcctctggggacccccttgcttgtgcccctctgggtcccagcacatcccaggcctgcagggagggggagaggaagagactgactcactggccaggtcccccaggggctggagaggctggagaggcaggagctggatcagatctgaatccagaggctctcggaggaagagctcagggtgagctgcgcccccatcccctgcccctcctctcctgctccttctcccttccatggtcccagccagcaagcacctggggtagaggggacaaacccaggtggctgtgttccagccctggctgcaggtctgaatggctttctggggtggctggccatgctccctgagagcccagctgtggcgatgtctgagcaggtaggtgggggagcacctaggaagcaggggtgtcaggcagagcacaaggagagagggtgtccaggtcagtttcaggacctggctgagaggagggggctcctcacgggcaccgcctctggcaagcacagggacaagggcaaggacggcatggccagaggtccctgggagcctcttcccctctcttcttcctagcagctccccctcactcttcccagggaccctgtcactttcctttagcgtgtggcagctccttggcgtccctcccgtgccttcaggttgcttctgcgccgggcctgccgctgggcgcccctatctctgcctgccccctcctcctgctcccctcgccctgcccccttggagcaattccccaccgagcctcccttcccaggcagtcgaggtccctccctacctctgccccgcgctctgggaggctccttgttccgcgaccacaaagcccctttgatcctctgctcggctctgagccatgtgacccggtgggcgggccgcggctctcggcgcgtccagcgcagcccgacgttccgctgctggggtgagtcctgctcctttgttcttcccagccttgcaccactggctcgggggctctcaggtggcgcggccgcgaggcggaccctgatggccatggtggcggtgccgggagccacgctgtccctgggccccggcccgaggccggcaggaccgagcggggtccccaggagaggggtggcggggagctcgatctccacgcggggaccagattttcggcctcaaaatagaagaatagggctttgtgtggtcacagctatctctttgtaaatatttggccaactaagctgagtggctaagttctcctgctgcccggagcttcttggaacatgtttccttttcgcaaggggtttccctggcttccaggagggccaggaagaaattcgaattggccaccgctttctctaaaatcactccgctcaagttatcacccctctgggctcccgaagaccggctggctggaggctggagatagtctcaatgctcgaaatgccgtaaccgaagctccccgcggcgccggcactgggatccagggagctgctgctacagcgcagctctggattcctggatgtgttggatatgtgcagggcgttcctgggaggagcggggagggagggtgctgctggcggggctggtctgcgtgtgctttgcttctctacaatggcatgctgcgtgtcggccatgcagaggcatgtcagtgagcaggggctgagggatctccctaacggacctgctttcagagggtcttttcatgctgggagaaccccagagactaaatcatgcagccaacggggtggtccccggcctcaaagcagggaggggcgaggagctttgtaggcaatgccatctgctcctgaaacgccgtcccagtgactctggggactgactcagcctccagcctgctgcacttcatccctggcccctctctctttgctttttcatgtgaaatctgctgtgttttggtcagaggtttggggaacagctctctgctcatctaagataagtttgtaattcctttcctggagaaaaatatgccacccggaagcaggttgagcagtggttttctggcaggtctgttcggggctgtggagacagcacctgctggatcaggatggagttggaatttggtttggatcccacatgagaaaacccgttggaagaggaggaagcagaaaaaggccccattccctaataatgctgtgggttttcctcctccattcattgccaccttgccttgaaacttaatggggccacgtgtgtttccatgaatgtcattctctttggccaactcccccggcagccccaggagctccttttcaggaaaaggaagaaggtgtttgcttagcatctagtatacgagtccttgttggaaaggtgggattcttgtttctccttgggtctcttttaggctgagatgtggtcaaggaaggcctgtggtgtggctcgccttttttaatgctcgtctctggagacctgagttgctgctgactcccagcttgccccttctgtcccctggccatttctgtgtcggggtggctgagacactattgcattggccactttgtgttcccactagcccccgcccctgtaggctgtcattgtgatggtgatggggccaattcagctgcggtggggaggacccactgtgtgcgcctggggggtggcgtggggcactctgggatgagaagatgcgacttctgccctgagagccctgctttaatggaaggcgggggcatagttgcaggcagaagccatcaagcactgtggtcagaccagcattccatgtcaaaaatggccttgttggccgggcgcagtggctcatgcctgtaatcccaacacttcaggaggccaaggcaggcagatcacctgaggtcaagagttcgagaccagcctggccaacatggtgaaaccctgtctctactaaaaatactggctaatccgggcatggtggcgcgtgcctgtaatggcagctactcgggaggctgagacaggagaatcacttgaacctgggaggtggaggttgcagtgagctgagattgtgctactgcactccagtctgggcaacaagagtgaaactctgtctcaaaaaaaaaaaaaaaaagccttatctgggcctgggatctgtcctccgaacactgggtccactgtgctccacaaggactttcaccccggaagccctagacccacttgggcaaccagagtctctgggttgaccactccccagccctggccagcctcctgggccaccgtattctcccaacttcctgttgtgccacggctggtccaagctgctcttatcagacaatgcgaggcacttccacaggaggggacaaccccgtccttaggagccccttctccctgcccccaggcctggtgcagtgtgtggcttccctgccggtgtcaaaggtctcaaggcccctttaagaagcctgtcaccaccaccagcagcttccgttatctggttcttctgtacatgtaagcctttcccatacaccccggatgtttagggcttccgccctctctccctggccgggagtgtgggaagagggctttatttcaatgcttgagagtagggtcaatggccagggtaagctgtgggggctcctccccgccggcccctctctgcagccctcaccttaacacagagcatcgataccacctgggctttgggaagacctggaggctgaccaccctggaggctcccagcgtcccacagccactctttggggaagaggcttcctgagggacttgtggcccttggctgggactctagtcccagagttctgccttccggcgccgagctttgatttgtttattgagtgccagcccggttcccggacaggtagggacctgttcccggagctcagcagagccttgggaagctttcccaggagggctcccgagggtggcggccatgcccagtccgctgtacgtgtgagtttgtttgatgaggaattggctgggaaggcgcgggtctaattacaggcccatgagggtccctctcgcccccacccaggaagcagcggagatcctggcacactcagcacctgggcctgtgcctgcccagctgctggtggaatcatgggagccttgctccggggcctgtagagcagcagtgggaaccttccccacctcagcccctcccagagttggctgttcaaactcgccgccgctcagcctcttcctcctctctttcatcaaccctgggaatcgcacactgcccaccccaccgggccccggagcgggtgcaggaagagagagcttaacacccagaggtctgggccttctgcaggcgcctgagctgctgtggcctgagctgggttccctgctggaaccatcacagtagacctaatgatctgcctgcaggagttgcttcatcccagccgactccggggctgcgggaaggggctgggccttggttttgctgggggtggggggtcagtgcaaagggcctgaaaagtggcagaggtgatggcccatctgtcctccccctggccggccggcctaaacgcgattggctctctttcttttttttttttccctcccttttccctataaataacactaaatgcgatttgtcaatgcattcatttgggttcagtagttggaccatgggcagaagcactccagatttgtcactttccctaagctaagggtggggaacaccctctgtgagatcttggctcctgagcgcccaagactgctcttggaaccccaactctgggtcggtctcaggggactgacgttgatggagttgctgacattgacctccggcctctgcatggccttcaggaagggggcccttcgctctctgtcccgtcgagcctggctggcagcactcccttctcaggcctgtgcccccggcagggcctgctgcccccgccctgctctgtgggtgccaggctccaagcaccaggtgactcggtcactgaatggtcactgaacagtcatccttgctggtgtccccagtggaatgtgcatggacgtcctccctcccccagatccttgtcttttatctctcagcctttgttccaggggccaccacaggaccaggaggtacgcagacgtgggtggcacatccactgggcagattcagccctgaacctgcacgccccctccaagggggcccccagcgggcggggttgatggtgccgtctctctctctgtcactagaacggacatgaggattgtgtcttgtcgatccacgtcctgagttcccagacgtcataggtgcttgctcaacgagtgtttgaatgaatggtcagcattgtgtgaccgcagattttcaacttttatccaaatagtttgtggtttctgtgaggctatcccgagacagtctcacaagaatctccattctccctgcacgctccgcacaaggtctccttggggggtttttcagaaaaagggccaaagagcagcatttcctcggggatttgaacacgatctcccccggggcaggggactgccctggaagattcccggcaccgcttcccatgcgccacgtgactaggagggtcttggggcaggatggtgtcttttgtgccttgtgtgctggggccggaggaaacactgcccgtggccggtgtcatctgccagccctgaagactaatgatgggctggacagtggccccattgagtgggagggagaatcgctgctgtctgtagctggggggccgggtgggtgggagccgaggccagggagaacagcgcagacctggcacggagaggcctggaggaggagcagggggtctcagccacccagggtgcagggacgccacacgaggagcaggtgtggtgtgcgtcctcctgcgggttctccacctcttggcttcgttacctgcactaggctttgtggtgagagggcacagagtggaggaaggtgccgtggctagggcaggccacacgctgtgctaatggattgctgttacctgtcgcctctgtggttttgctgtcaggatcctccagcaccaggtccccaccaccaggtatgggccccacaggcactactggctccccgaagccagggacagaccccatagacaatactgagtccctgcagccagggatgggcccccacggccagtaccagatctcagggaccagcaccgggtacccacagccagggacaggcctccatggccagtaccaggtctcagggaccagcaccgggtacccacagccagggacgggcccccatggccagtaccagatctcagggaccagcaccgggtacccacagccagggacgggtccccatggccagtaccaggtctcagggaccagcgctgggtccccacagccaaggacaagtccccacggccaataccagatcccagtgaccagcactagatgtccacagccagagatgggcccctatggccagtaccaggtctcagggaccagcgctgggaccctggatgactgaaggagggcacggttgactaaagctgcaggagccagcctggccatcctgaggcactaagccatcactgcggtctcaggggactcagactcctctacttgtcttcttgaattctggaatcagacacacctgggtccagcctttgcccccggggctgtgtgcctgggatggttgcctcacctccctgaagctcagtgagatggggacggctgcacagggcccggcacagatggcacccgatggcacagggtcacctgcttgcatccatacagcctcggccctcgctctggctgcgtaccgagagtcccatgcccagacctctgctgagtctccaagctcctggtcatgcctcaggcctcccgtgagaagcatcactgcatggaccatgcctcgggacctcaccttgggctgggaagcttgctccatctccccaagtctcccctagaggcgccccatgtcccatcactctcactgcttgaggggtcagataggggaacccagtgtgggaggcccagaggtgccggagcagacgttaagcgagttccgtgtttatgcgctgggccttggcagacaccctgaatgagcctcttccccaggaaggagattggggtcccagtccaagttgtggcctcaaaccctgtgaccaagagtggagaaaaggcaagacccctcctcccagtcttccagaacagccgatagtggtggaaacatggggttcacactgaatttccttgtaacttgttgaagagaatttagcccacattttcaggggtggaggtctggccgatttggcagtgtgcccgtccccctggccacagtttactctggaccgggcaccctggtgccctccctcagtgacgcagtgaagtcactatgacgtgtttagttggtgagaaagtgcctcctgtaatgttttactcttcttagagggtgaataagccttgtttattataaataattatttacagaatacatgaggtttaacctaactctgggccacggcagcgtcccctgggtaaacccacgcgccaccctagctagagcctgtgcccccacaggcttcctggactcaccctgaaggggggctggattttctgcctgtcccgatgagagggctgcaggacagtccccagcgagcccttctgagggctgtaacctcttcccctggtattttcctgctcgccaggaatgtttcaagcttccagcagaagcctacccaccatagtcgctttccaccctgctcaccatccctcctgccctcactcattcagcagaccccgtgcacagcccagtgcaggactcagggtgggaaggtgtcccgggtgggctggagcaaggttcccagccagggcggggtcccaaggtgggtccacagccaggactgtgatttgggaggcccctccctgccttgttccagccccggcaccgccgctgtccttgtgctcagtggagactcactggctccaggctctaaaacctcagcgaggtctgcagacagggaggagccccactcgagggtagagtgactgccgggtccatttgcctgttacgaaccacgtggcctcagacctgccattcctcctctcctagagctatggtcttttgtctgaaaaatggataatgatggttaccatgtcagggaccattttgaggacaaacggggatgaaactgaagaggctcagcacggaacctggacacagaagtgctaattgtgtgttaccagctgcggtggctgccaaggcccaaccacatggcagccacgggctgagtggcgggcgggaagtggggagcaggagcatgcaagatgggcattcctgaagtttctgatccagtgagataagtacacacccagctctaagatggagtgtcccaggaaggtggagactgcaaaggccttgtggcgcaggagtgtgagctgcacctctgggctctctagaatttcaccagagctcagggaggaggtcagctcagatataggggcaacgggagagatgggagtgagaaaatggcttggcgtctggaagtggagcctggaaaggtgggcgtggggacagaggagggccttgggggccatgggcccatgcgtccaggaggtggaggcagtgaacggggccacggtcggccccacacgtggcaccaccagccctgctgagcctgcacctgctcctcaggccccctgagtgccactaccacctggcaccccttggtctgattcctgcttcctgcccgcctgggaagagtgagaccacttgcctaaagtcccttagctgtccttaaccattctggctgcctcctggccctgtccagggttagccgttgacctgaactgcctggtgccacctccccagactcctggggccttgccctggcaccaacagccacctccatcttcatcattcactcgcacattcacccagcagtgctttttgggcatccactcagcaatatcaaggcgctgagatgcggctgtggttaagacccgggcccggtctgtgaggacctcgcagttgccatttccccagagcacagccccagccaggcacactgtggggtccagaaagagaaactaatacattgtgttcgtccattttgagttgctataaggaatagccgaggctggggggttatttgactcacggttctgcaggctgtacaagtggtgccagcatctgcttggcttctggggaggccccaggaagcttttcctcatggtagaaggtgaagggggagctggcacgtcacatggcgagagagagaactcccagactctttttttttttgaaatggagtctcgctgtgtcagccaggctggagtgcagtggcacaatcctcggctcactgcaacctcagcctcctgagtagctgggattacaggcgcatgccaccgcgcccggctaatttttttgtatttttactagagatggggtttcaccatgttggtcgggctggtcccaaactcctaaccttgtgatccacccaccttggcctcccaaagtgctgggattacaggtgtgagccacctcacccagccctcccagactctatagcaatcagatctcccggactttgtgaccgtggggagggcaccaaaccatccatgagggatccacccccatgacccaagccccaccccccccaggccttacctccaacatcagggatcacatttcagcatgagatttggaggggacaacgtccaaaccatatcacacgtgacctctctgtgcgtgcgtcagtttctacatctggttaagcagtagaagctccttctctgttccttgttgagagagcggtgggggagaaatgactcagggatgggaggctggtcccccgaggggccctggtgtttgtggagtgggagtgcgggaaggcccctacgttgtgtgtgccgtgctgggctggctcctcacagctcaccgtggtgctccccgaggactgctggggaggaaagagctaattaacttggggacccagctgctgaagttatcattaaacttgagcagtccaggggcccctctccttctgggtcctatgtcacccagcacagtggggcttaattgaattttttctcatcccccaaggctcctggctggcgtggctggggtttgggatacggggagcgagagggcttgggcctcttccagatttggagtgggttcaccagaaatggcccaggaaaccgcgggggccacccccagcagctgggggctcctgtggtcatttcctcttggtcctgttgagcagccctggcccctggagccctcagcaagggatgtgggggcctgccaggccagggtcctcactgctgccgctatgcacagctgcatcttgcatccggggagtggggtgccgagtggggtgtttgggaggcaggttttcccttgtcccttctgcccagagaccttggggatgagttgagtgagacccttccggcttctgactggctgtgtttctgttgccatcccccactccttttaagtggaggtttatgacttccttctttatttaaaagggtcatttagtgacttagcagatcccagtctgtgttacccagggcccttttaaaaatctgtggggaggctgggcttggtggctcacacctctaatcccagcactttgggaggctgaggcgggtggatcacctgaagtcaggagttcgagaccagcctggccaacatggagaaaccctacctctagtaaaaatacaaaaaattggctgggtgtggtggcacgtgcctgtaatcccagttactcgggaggctgaggcaggagaatcactcaaatccaggaggcggaggttgcagtgagccgagatcacaccactgcactccagcctggacgacagagtgagactctgtctcaaaaaaataaaaataaataaataaaaataaaaatccatggggggacctctgtgtccattggctggtgtgaggagagggtgaggagctgcagagaaggtaccaggctgaggaccgcccccacccttgggctacagaattgaaggaggggacacatgaaagatgttcctagactcgggctggaggctggggacatccgagggcaaggacgacgctgtccctgctcttgtttgcagaggagtgcacagggctcaccagcttcttgttgctgtttaagtgatagctttatggagatagaattcacatactgtgacgttgacctttttaaaatctacagttcaatggttttgctgtattcacaaagtgattgtattagggtcatccagagaaacagaaccaatagaaggtgtgtacgtgtgtttagataaagagatttattattatgaggagttggctcacctcattacagaggttggcaagtgccaagattggcagagtaaatcagcaggctggagacacgggagagcccatgttgcggctctggtgtccacctgaaggcccaagacccaggagagccaatggcgtcgttccagtcccgagacccaggaaaagcgcatgtgtcagtttgagtctgaagcaggaaaaatctgatgttccaggttgaaggcggttaagcgggaagaattctctctcactcaggccttgtgtcctcctattcagaccttcaggcctttgtcacaaaattacaaagacctgatcagaacaaaatctgagaaaaaaccctttccttctatcggttttggattcattggctgggaccctggaaattagactgacagagattaacaggaaacaagcataacaattcaagtaagttttacttgacaccgagccttcataaggaaatgaagacccagagaaaccgttagcctgagcggtttttgttttgttttgagacaaagtctcactctgtcgcacgtccaggctggagagcagtggcccgatcacggctcactgcagccttgacttcctgggctcaagctggggcccagctgccggccccgggagctgctctgaacccactcttaagtcccagctcagactcccaagtagctgggactacaggcatgtgccaccccgcctggctaattttttattttttgtagagacagggtcccactatgttgcccgggctggtctcaaactcctgggctcgagcaatcctcctgccttggcctcccaaagtgctggggttacaggtgtgagccactgtgcccggcctaggcctgaacagtttttatttgttttgcttgttttttaaatttgtttgttgcttgttttgagcagtttttttgtttatttcttttgcttgtcttttgcccaggctggagtgcagtggcatgatctctgctcactgcaacctctgtctcctgggttcaagccattctcatgcctcagcctcccaagtagctgcgactacaggcgtgtgccaccacacccggctgatttttgtatttttagtagggatggggttttaccatgttggccaggctgttcttcaactcctgacctcaagtgatctggccaccttggccttccaaagtgctgggattgtaggtgtgagctgctgtgcctagcctaggcctgagcgtttttatgctgggtttgatgaagagtggaaagtcgtgggaaactgtgacagagcaacaaaagatgagctgaacagtgagcccgtgggggtctcggcaagacctgtgtactggggcccctctcagatcctctgtctctggagatgaggctgttcctttccgctgggtgtagggagggcacctcttacgtgaggggcttatgatctacttcagagaaggggcaggtcagtgagttcttcttggacctgccatttcttaaattccttcagctgaaaatatttactatgccaaggcactgtatcttggagtgtgcgttccaagccctgttgccttcaactgatcgggtgaggcccacccccatcagagcacacagtctgctttacccaggctcctgattgcacccttttcctgtttgccccgagaatactcaccagcagtgcttgtggctgcagcgttcaccccaagataaatttgccgggaagtatcttgcttttattattattttcacatcactctagtatatcgactttggaaacaaaagacatcattctgtttatagcattccatttttagtagtggtatttcctttaaaaaaaaatggtaattctcagctgggtgtggtggctcatgcctgtaatcctagcacttgggaaagctgaggcaggctgatcacctgaggccaggagttggagaccagcctggccaacatggtgaaatcccatctctactaaaaatacaaaaattagccaggcgtggtggtaggcacctgtaatcccagctacttgggaggccgaggccggagaattgcttgaacccgggaggcagaggttgcagtgagccgagatcgcgccattgcattccagcctggacgacagagcaagattccatctcaaaaaataaataaataaataaaatttaaaaaaaaatagtaattctcgatcgctgaaaatgtcaaatcctagagaacacagcattcctacaagtgatgttaacattgttcttgatcagttgttggctgaagattcatttgatgaatctgatttttccagaatagacgactcagatgactctgttgttttgcttagaaataactgcaggaacaatttaaaaaattttttttctttttaatttttttgttttttgagacggactctctctgttgcccaggctggagtgcagtggcacgatctcggcttactgcaacctctgcctcctgggttcaagtgattctccagtcttagcctcctgagtttagctgggattacaaggtgcctgccaccacacgtggctaattttttgtatttttagtagagacggtgtttcaccaggttgaccaggctagtctcgaacccctgacctcaaataattggcccatgtcggcttcccaaagcgctgggattacaggcgtgagccaccacgcctggccagtttttatatttaattttcacacagagcatccagtcagatttgcttcagcctcaaagagcgtgtttatgtaaaattaagtgagtgctggcagtgagctgaactttctaaaaggtaaaagggttaaatattaaactcatccaaaaacaccttcacagacacactcagaataatgtttgaccggttacctaggtgccccatagcccagtccagttgacacagaaatttttttttttttttttgagacggagtctcgctctgtcgcccaggctggagtgcagtggcgcgatcttggctcactgcaagcttcgcctcccaggttcacgccattctcctgcctcagcctcccgagtagctgggactacaggtgcccaccaccacacccggctaatttttttttttgtatttttagtagagatggggtttcaccgtggtctcaatctcctgacctcgtgatccacccgcctcagcctcccaaagtgctgggattacaggcatgagccactgcgcccggctgacacaggaaattaaccatcacagttacacagccatcgccattaatcccagcacatttcatcatccccaaaagagaccctgcccccattagccaatccccattcccaactccgggctctcagcccctagccaccgctcatctgccttcgtctctatgaattcacctgttctagatagtttgtataagtggaatcgtacagtatgtggccttggtgtctggctcctttcacttggtagaatattttcaaggctcatccacattgtagcaggtgctggtgcttcattctttttcatggccgaataatattccatcgtggatagaccacactgtgtatctcttcatctgctgatggacatttgggttgtttctgctttttggcataattctgttgtgaagaattctgcagtgagtgctggtctacaggtttttgtgtgaacatgttttcatttctcttgggtaattgcaagatcatgtggtttagccaaccagcctttaagccatgtgtctgctgagggacccaggcctggtgggggtgcattgctgtgcttggccagccaggtgctgcgagtccgtgtcgcagccatttctctgtgctgtgctctgaggttgtctcgccggcaccgggcactgtgagccccaggaggccaaagccccctttgttttatcttgagtccaggcctcgctccatgaactaggatgaatggacattgaatcaacgcagggatgggtggggctggggtggggacgcagagtgaccccgggggcctgcagctgggtcctggctgctgacttccagtttcctttgcctgttggagcccagaacaagtcagaaaggggaaatgcaaagttcgagtgtcttttctgtggtagactggcaggcctgggtgggtgagccacttgcagctagttgcagcgtgagagaggaagtgggaggggagggagagggtgagtttggtgtaactcacccctggaaggaggctgggctgaggctgggggaagtgacttttatttttctgagaggattcttccctggggccaacttcaaaccaagggagacaagaccttcctgggggaggctggaagtgctggggcccccaggtgggcaggtctcccagggccaacgtcttggggaagctataagttaccatgtttctggactgtcacacacacacacacacacacacacacacacacacacacacacacacacacacgagtaaactgtaacacaaatgtgtgcccatgaaagtgcccactttaaaccaccacacagcctgtaaagcgaaggccctggcccgcatctgggcacccactgcccagccagccggtaggcagtttgcactgtagtctgttaccatccctcagagatgcagccgaggagcccagctggcttggagggcccagtgggcgcagcctcaggaaagtggtcaggcccgggccaggccccttccccctcccagccttgggagaaattaccatatgaatgtagctccttcccggagttcgggctggaagggcctgggaggggacaggctcccaccccaggagcttccaggttccggctgctgcctgtgttagctgcgtgagcgtgagcgagccaggggtcactactgggtggaaggaagaagcgggcatttcttccaggaggtcaccgttggagtcccacagtaggtcaaccccaggccctgggtcctcgggaggaggagaaagaagagaagcaggaggtgtggagggtaggccaggaccagaaggcacacagggtcggggcagtgtgggagaccctgggggctccctcatttaaccagctaacatcacagcgttcataagaacacgctattactgcagttttattactttgctctgatttcagaaggcacaactgatgactttagggaacggagaatctgaggaaggcctcgcaggagagggtcagatgcgatcgagtaaatgtgagccgtctgtaaactgtagagtgcacgcacagcaccggtcagccctggggtcagtgttcccctggtgctcagctcggcctctgcaccttttagtgctcggctgggctctgtgggggtcagggctgggtctggtacattagaggacttctaccaagcccctggcagtgtctcagttactaaatccagtttgccagttactaaatccgctctgccggttcccgaatcactcttccgctggggccggccatgtcacgtcaggcttttcatgcaggacggcagatggatagacgctgggaccaagtcatccttgggccgcgagacgtctgaccttctgctggtgtctcagaagatgctagctctccgtggcatgtcttccacgcggtgcttggggaccagtggcctctaaggggcccccctgcctcagcgtggggagtggcctggccaaggtctcagtgtctggttggagccaggcataggctcaggtgtactggctggaggcctcctgcccatgggctctgcctgtcctgtgtccctggtccttactgtgtcttctgtgttcctgggagagaccccaggggccctgagcccagcactggggttggggagtgggcggggaagagggtggggattagggtccctggctgcagaacagccaggccccaagtccccactccactcccctcccaccgggcgcctcatcccacactgaccatttcctgaagaaaatttcctgaaccggcctcccaccccggctgtcccaggaagcccatccatccttccgccttaatgctttgtggctccagaaggatggtggaagccggaaatcatgagtctcattcacaggcggccacacaccgaagccgcggagacgccgtgggaaaggactctggccagcgcggccggcacagagggagcggtgttaccggggtagacgggaaccgtggctgcccccatgctggtctgggagagacgaggggccggacgaaaggacagcagactggccattcattcatttattcattcactcattcacagcgtcttactgggtgcttcggacgtgtaaggttttgtgggtagtgaatgcgacagaccccagacagcaatcggagggccacgtgtgtaagaactgagggacctaggctgggcgtggtgtctcaagcctgtaatctcagcactttgggaggcagaggcgggcggattacgaggtcaggagatcgagaccatcctggctaacacggtgaaaccccgtttctactaaaaatataaaaaattagccgggcgtggtggcgggcgcctgtaatcccagctactcaggaggctgaggcaggagaatggcgtgaacccgggaggcagagcttgcagtgagcccagatagtgccactgcactccagcctgggcgacagagtgagactccatctcaaaaaaaacaaaacaaaacaaaacaaaacaaaaactgaggaacccagtgtagatgagctatcccgggaaaacaagtgggagttctaggaacagcatggggaagggatggtcccggcagggaggacctctgtgggtagccttgttggaagagctgaaaggcagccagagaggctgtgcgtggatggaagctgaagagtaggttaggggcgtgtgttttgttaacaaagacttcaagcatttactgaccaggcacaacactatgtgcttcataaataaatatctcatttgatccccagcattcttatgagacagatgttattatcccatttcacatgtaagaacattgaggcacagagtggttaagttacttgctcagggtcacacagcacgtcggtggtaggcaggattctggagccacaggaatctggtatatcccaggtgcaatggaaaccagtcacggcttcatagagggaaatcatcagattagtaaattttacacacgccccctggtgctttgaggaggagggattcggacaggggcagctaatggtggtggctgtgagatgtgttgggttaacattgatgagagtttgggatggatgagtggattcggagtaatggaaatggagggcccaggcccggcccctggagatctagctgcaatagctgttggctggagaggctgttcacttagatgggggatggggtgggaggcaggtgagatgagagctccagagttcagcctggggcacggtcattgggttcaagatgccttcagatgttggggcttgacagtgacagtggctgcagatacccaggacccagcagagggcctggcacagcggggcccagggacacgtctgtgagtcaggctggcactcaagtgtgaatctggacaaagaaggtggcattgttggcattgaatgctcaggggctgggtgaagtcagctagggagaggggctctcaaggcaccaggactgactccgtgggtgagggcggaggaggagacggcagaggctgagagaatagccagagacaggaggaaggtcagcagagccatgcacagaagcctggagaagatttgaggaaaggaagggctgggtggtcgtcattccctgcagctaggaggcaagggtgacccctgtgtgtttcattcttcagaggattggtggctccatctggtcagaaccccaagtccagagatgcatctgagcttcatgccatggtgcaggcagcaggagccatggagcaggcctgcggggtcacggcctgcctgctgcttcctggtgtctctaccctgagctcaggggttgcttggatgccctgtgctgcatccccccaggcggtgttccagagaggatgaaagtggctatctcaaggtgtgaccaggtagcggtccatgcacactgctttttcctggggagagtctgggatggaagggtatgtgtgtgtttctgagactccttgaataggctccatgtacctatccacccatcttaccacccacccacccatccactcactcacccatccacgcacccacccatccacccatccactcatccacctgtcaacccatctatccactcattcacccatccactcatccacctatctacagtcattcactcatccacccatccactcatttacccatctatccatccactcatccacctgcccatccactcacccacccatccactcatccacccatccacccatctatctatgcactcatccacccatccactcatccacctatccactcattcactcattcactcatccacccatccactcattcacccatctatccatccactcatccacccatccactcattcactcatctgtccatccactcatctacccatccactcattcacccatttatccatccactcaaccatccactcatccacccatccactcatcatccgtccactcacccatctatccacccatgtatccatccactcatccacccatccactcatctgtccatccacttatccacccatctactcacccacccatccactcacccatccatctacccatcctctcatctatccatccactcatctacccatccacttatccatccatccactcatccgtccatccactcatccacgcatccactcacccatccatctacccatccactcatccacccatccacttgtctactcatccactcacccacccatccactcatccacccattcactcatctactcatccactcatccatctatccactcatccaccaattcactcatccacctatctactcatccacccatccatccagtcattcatccatttgctcattcatccgccaacccatccattcacctgcctgttcatccacctacccatccattcatccatctgtccatccatccacccacccactcacccattcacacacccatacacccatccatttatccaaccatccatccccatccttacttcagaaagcatttgaagttgctggggtgtgcacttggaaaatgcgtcataagctttcataggcctctctttggcttcctcacttctttgattggtctttctttcggacatgcaggattctgagcagctcttctgggaggtgggtgcagtccaggtaggctgcctgcaaagctaggaccgagggagccacatccaaggcactgtgggttcccaaggcgatggcactgtgggcccactgcttccagacctcctcaactcccaggctcctgagcaggaggactcctggggcagggcctggagacgggaagagaaaacaattccagtctctcaactcttgtcagtccaggtgggtgctgcatggattgggggcacctggaacagttggccccttcacccctttcccccacctttccagcccctctggctataatcagacagttgtgtgcgatgtctttctccctcctgaaggggtcatttagtcaggctcctactcatggcccaggaatgtgcccctccctgcctgtcccctacccccaagcaggccgtgcctccagccccctgctgtctctgaagggcctgggcatggggcagcctctgcagcatccccagggcccgagctgatctgcacagcagaagggaattgggggaaagctttttttctacccagcacctggcagggggccaccctgttgcaccccagagacccttgtctaagttttgttatttcagatgatttcataagttgggggaggcggagccccagcccccacagcccctgttgttgcctcactgctgagctctgctgtgtatctgctgacaggtctgctgatagcagaaggggctggagagagggaagctctgggccctgccctccccaacccctgcttaggggacatccctgataagaggaaattccagcctgtgacagatggccagtgtccacccacccacgggggaacttttctttctctttgtaagtttgcagatttgccaggaactaaaggaatctctggttgacaggccactgtggacatggctggagggctggcacgggctggatcttggggttgctttgaggtaggggccgctcctgctggaaggttccttggggtggggaaggcatcagggccattccctgaccctccctctgcagtggatccacttcagagcctgagacaaggcaagggggcagcagaaaacagaatataaaatagccccccccaccacacaccgcaccagaagtcagaggattcatccttggcctgccctccctgcagcctaagttctgagagtggctctttaggaagtgaatggtgatggtttgcaggtcagagcttgctctggcccaagattgatgtctcaataggccgcggagcctgggtgaaaaaactcaggctagggaggtggtgggttgcaaatgaaagaacagaggagggcctcttccagaaagcggcgggtggtgtgaggagcccttggaccttgtccaaatttgactttaccgactggggccaattgaaaccgtgctggcagaaaggcaaaactgcttgagattccttcctccacaatagaggagaggtttgcttgaaagggtttggcgagggaaaagctggaggaaccttggccggcagtaaaagtggggacccccgccccctgcctcgggggcgcctcggcccctgaatgaatgaaagaggaggctggatggagacagactcacaccacctgtcccttccaggtcctgcaaaggagcacacagggttcttgttggctcttccaccttgttagtcaccaagaaggagaaaacaccaacaggggaactgtaaagctgcagttttgtttaagccccatagtggaaaccggaaagagctccagctcggagaaaaatgcagctctttgcctttgcaaatccgtgtctttctctgggaggccagagccattgtgctcgatttctaagcagggtttcagagtgtctcaggaggggaaggcagagtctcagatttccggcatcccaggtcctaaccaggctttgaggagacgcttcctgtcccatacaaagtgtgaagtgtaatttgatttggagttagttaacaaattagatgagctgtgtgcattttaaaaattcagtccttgatcccccacccacacacatttgcacaatttggtcatttatattcagtgtttccatctttagaagagaacaggaagtccccagtgacatttatggagtgtttgtagtagcttgggtaggtcagtaggaacacaatgcagtgaaaagcagagttgagatgggaaaatatcctgttttcagagccccccagggatgacattccttatcgtctctgtccacccgctctggagtccactccgcaaacagcaacttgttctcacttgagagcttcctcctgccggagctcagggatggagagcagctggcctcagtcttctcctcttacctctttgtttctcagactcatcttccaccttgaataattgtttttaacctgctctccctcttctctagctgtagaacccagaactttgtgtgtgtggtcaaaagtttagagagtgctgcaggtaatgctgagataaccctattaaattctgtaagttctcatcacaccaagtttgtttgttttttttaattctcattttattttatttcattttatagggatggggtctcgctacgttgcccaggctggtcttgaactcctgggctcaaacgatcctcccgcctcggcctcccagagtgccaagttatttttttaactgggatccacgggcctagggattctttgatgaaccgttcaaaatacgtgtgtgtctgtctgtctgtcttcaatgtatacttttctagggagagtctttacttttcaccagaggtttgtggcacacacatgtcctgtactactgtatcagattgtgaattccttacatgttaaagactgcttcaaatctgtccggaagtctcggctaataaacatttaaataaatgaacttcaaattcccatgtgccaccactgttttcattctgactactctcaagcctgtagtgtcatctttttgttactgtgaagtagacactcaataaatacttgtcaaatgaatcaatgttatggtcctggtccactaggaccccaggatcatcgtctaccattattgtctatagtttctttaccatcttgttccagagcagttctttctctgaggtctgctcacctctgcacgtgtgtctagtttccagccctgtcgccttaccattctctttcctttacctgcatttcctgaactgttaatagttaacaatagcttctccctccacccactcactcatacctgaagtgagaagtcatcattgaggtctctgtggattttgtcagcccaacctggggcggcctcctggaggtggagttttcagatgagggatggacattttggtgtctgctgggtagatctacctgggagctttggcaggggccccagggcagctctgcctctttattttggctgtgggacccctggtgcactagggtttctcaagtaagcatctgtgtcctgggagagccataggcaggcctgagagggcccctggaatctgggacccccagcccggcccagtagctggtaccatcatctttcttgcaagggaagttatggaaactaagatgctaatgtgctttgataggcctggggtggctctaagccctgggaagagccctggcaactttccctggctggcgggtagaatcttctcctggcagttcagggctctgcctccagctccctgggggagagcaactgagggaggagctggaggccaaggcctcagtgctgagctgcctgcaccgcagctgcaccttctgggtcctggctgcaggaaccccatacttctccagcctttccatggttcccgaagacctggcctggggagggggtcagcagcctggggctcacctacctggcttcaaatcctggctctaccgcttactcgctttgcgaccctcataattgacaaaagccctctcggtctcggtttccttatctgtgaaatgggacaataacagtggctaccttataggattgtgtgatgatccatcagttataatagctcctgagcagcgtttagagtaacacctggggctcggtgcagtggcttatgtctataatcccagcactttgggaggccaaggtgggaggatcgcttgaggccaggagtttgaaaccagcctgaccaacattagtgagacccactctctaaaaaaaaaaattagagtaacgcctggcacagagagcccccagtaaacctcggctgctgtgatgagctttgtttcttcatttgttcattcattcaccagactttttgccggggcttgccgtgagccctacgctgctctgaagaaagccgggctggggtgagcgtgatggatgaggtgtctggcttcacaaaccctgtgtgggggggttgtggtgagaggaaaccgcacacatcattattcagttaccatcgtggggagactgtctggacgcagagagcaggctctgtgtgggagcggggagggcaagccctggttgcgaggcagggcttccccaggattcagcagggatctgaaggactttgcaggcacccagggagataggagaggaggagggagcagccctggccggacactgtcctcctagcattgcctgcatcagggactcactcagctttaagaagcccctttgtgggggacagggagcatctgttagtttataggacctgaagtgcccccatgggctcaagtttctgggaaggcctgcaggtggccgtagggctgccgcaggggtgctggccccagggtctggattcaggggagcctgcagagggagggcagctggaggctgctccagtgtgcattgttacgaggcaaagtaaggagactgctgggcccacgctgggccggggtggatggaggcaaggaagtcttcgccggggcaagggcaccagctgtagatgccggcagctttctcctggacacgggcctggaaggctgacagggtgtggtgagtgccaccggctcccctgccgtggcctggtcagtggcttcacaggcctccgtgggcaggaggaggatgaccttgcattctgcttggccaccattggcagtgacagacaaggtgtgtggggatgtggccatttcggtccgtgctctgagagccaggtgtgggttgggtttggggaagacaggggaatggcattgacttgaccctgagcactttgtcctggggtgcaggcccggctgtcactcccctggagctgggaatggcattgggcggtggctcagggtcccttgccccagcggcaccatctctgcatttggccagcaaggctgatgggacttgtgtggacatttctgggacgtagaccaggcagcatgacacacagggaggggtaggcagagaagggcggcccctgggtcttggtttccaagtcaggctttgcaagcctgctgtgtcaagccctctctcggcaccaggccaggtgggccagggtcagccctggggctgtgatgagtgtgagtgcccctaaagtgtgtcatgtccaatagctgcctcctctctgggcactgcctcccagccagatatcctacagcccccgtcccagccacagacagcaatctgattccctcatcctcggcaggtcctggggttggggtaagaatttgtcactaagtgcagatgttcccagagggtgctggctcagggctgcgtggattacagccctttcatccctgccttagacccacctgcaactctggagaaaagatggcccagtggacgcctgcggggaggagggagctggtccccaggatgagcagatttgggggcagtccccatcacgggaccggtgacctactgccaccagcgccagtgaatggcagaggggccctggcataaggcctgggttcagaatgggaacctgcagagaaactgtcaaggtctcccgccacctgacacctccgcctggctgccaccctagaaacacccttgctgcaagaagatgggggagtttgtctggggcatggtctggcgacaccaacttgagaacctcaggcctaagtgttggcctctgggcctcagctgtcctctgagctgtaaagctggctcctgggcacttgtggaaaacactggactctttattttattttactttacattctgggatacatgtgcagaacgtgcaggtttgttacataggaatacaagtgccatagtggtttgctgcacccattggactcttcaatccagctccactagaaatgactgccttctttcccttcttccgtccctccctcctcccctcccttttttccttccttccctgtttccttccccctccctccttcccttctttcccttcctctcccgtcctcatggggatataatttccatattacaccatccgccgattcagaaagcacagttgagtggcattttttcacaaccttctataagcatcacctctaattccagaacgttttcctcaccccaaaaggaaacgccatcctcggtacacagtcactccccctcccccagcccctggaaatcaccaatctgcgctttgtccctacagatgtacttattctgaacatatgactagaaccctaaaagatgtgactttttgtgcttggtttcttgcagttggaatgttttcagagttcatctgtgttggcgcacgctcgtgcctttttatggctgagaaatagtccgctgtgttgactcagcacgttgggtttctccacgcatctgttggcggatgtgttagttatttctggagccgggtgtgttgtgctactcacgggctgcactaggagctggggatatcactgagtaagccacagcctcgggcacccaggagctcgcagagcaggagctgggagggaggtcaggaggtgcatggcctgtttgccaggctggagagacttgcaaaaagtcactttgagccagaaaccagagcctgaggcctctgactcccagctgcggagccgggagggaagctctgcattttgctttgactgtggggtgacgtgtcagttactgtccaaatcagaacctttctgagagtcgacgtgggtactgctgataattagtctggatacccgaaagaatggaaagcagggacccagacagatccttgcacaaccgtgttcgtagcagggcgaggcctggaggtgcgatggggatctcaacggggcagctgccgtcttgctggagcccacggtctttggggggggtcacaggtgttaaccgcatatcatacaagcaggagtgtgaaatttcagggttgccaaattcagtgagggtcttgtgctggcctggccacttacagtggcatttcaggaaaaaaaatcactctatggacctcagtttccccattagtaaagagtaggttggactggaattctgtaccatccagtatagttgccatttatgaaatgtggctatttaaatttaaataaaaatagaaattccgttcctcagttggactagctcagtgtcaagtgctcagaagtcacttgtgaacacactgtggcaattcctcaaaaaacgaaaactagaaccaccgtagcatcccataattccacttctgggtgtggattcaaaagaatgcacagcatcttaaagagctagagatatttgtacacccacattcatagcggctctgttcacagtagccagcgggtagaaacaacccgaatgcccgcggtcaaatgaatggagaaatcaaaggcgggacaggccgggcgtggtggctcacgcctgtaatctcagcactttgggaggccgaggcgggtggatcatctgaggtcacaagttcaagaccagcctgaccagcatggagaaaccccgtctctactaaaacaaaattagccgggcatggtggcgggtgcctgtaatcccagctacttgagaggctgaggcaggagaattgcttgaacctggggaggcagaggtttcggtgagccgagatcgcgccattgcactccagcctgggcaacaagagcaaaactctgtctaaaaaaaaaaaaaaaaagggtggaacatacaaggaatttgactcagccgtaaagaggaagttaggatacctgcaacagcaagggtgaacctttcgggtattacgctaagtgaaataatttggtcacaaaaggacaatcctgtaggattccacttataccaggtccgtagagtagtcagattcagaaaaacagcagaatggaggttgccagaggcttgggggatggggctggggagttgtttaatgaggacagtttgttttacaagatgaaaaagttctggagatttgttacacaacaatgcgaatgtacttaacaccactggactgcacacttcaaaatagtgaccgtggcaaacgttatgacaattaaaaggaaaagtcacgtggccagtggctaccacgctgagcagcgcaggcctcggacggtgtcgtggtcacagacaatggagtgggtgatctttaccattgtttccagctgtctgagcaccatggtgtcctggggccaggatgaaagtgtctctgggtatgggggtctctgcttttcccacttgggagtcctgaaggcagaccccaaagctcacctggccaggtaggagagcgaggcgggctcttgcattgctctctgcgtgcgtgcctgcctgcgggccagccggggcctgcaaggccgcctctcgagggaggggttgcaggaatggctctcacctgtgcagaaggcaagccactgccctacgtcaatggcaaagatggggctcggctgcgttgtattattatttctcaagcggggcccctggtgggcaggatgtttggtttgatttgagtttctgcagtgagtgctggtgcctgtggagggacccagctgcagctgagccggcccctccctcgctctgggctccaggggcgttgggggcgagaaaggagagttcagggggcagcgcctccccccaggtcctgctggggagggttgagggatgctggggggaggtgggggcgggtaggggctggtcccagtcccaggcaaaatggctctcagacccacaggcagatggaagcgattttcggtcacgtgggtggggactgaactgctgccccgcaaggcaaggccccatgtctggcttcaggaagcggccccaaagccacatggtccatggccagatgcagggctgtgtctttgtttatttaaaggtcctggaagcccaggggagagtatttctgaagggggagcaggagcaggagcaaagccctgaaggcttccaggctgcgtggcctgggtgggggccacgtgggggcacagagagaggagccctggcctccaggtccgcctgtgggtattgctctcagcagtggagatgtgtggacccccccttggcatttcccaacaaggaattatattgttcctttgttcccccaattccataagataggaattcctgtgccctgtggaggctgagaagacggggaggtgcctgtgaggataaaccagcccccagtttctggcttccagagtcttttcctctctcacctctgatgcctcaggcctggggagcctccctccgacaccctctgaccgctccagtgaaataggccgagagggatggcttgaatcggctggggatgcaggctgcagccagggggctcagtgggcatttcctgagttcggttcttgccccgcaagtggaagggcagttgaactgaagtctcccactgcccctcctggcctggaagcctgcctcccaccttctgggcagagtgaggagtgggcgtgggccgggagggctgcctcctgtctgggagggctgctcacttgcctgtcacgggggatgagccccctgcagcctcccgtgctgtggccctggctcccacgccggctccactcccctgtggctgcccctgctgggtgcccaccggtcccagggaaaagccactcccctcccggaggactggcgggaggggccctgcctgggagcgtgccgtgtggtccctgtcttagcgcaggatgcctgaggccagatcctccctgggaggcaggatggggcaaaagtctccccgcaggcagagcagggcctggatgggcccaagcagggacgggggcacagaacagcagccgcccagcctgcgtgggagctgagggccaccaagggcagctccagcctgtggggactagcagaggcaccacctctgtgaccagcgagttgtctgcacctgcatgcgcatgcaccagtgagtgtggcgagtctgaggtgtgctgggacctggcccgtgtaccagccagccctgatgggaaccagccccatcctgggtacccctggaaccccactgtgtgggagcacctgggtcctcagcaggcgtcttccgggcgtccgcccccagccccaggcctctgacccgtgtgtggtgtcttaacagcagccaggagcagggccatcgaagggacctacagacagaagaggctttagtgatttcgggaagttcagctccacgtgccccacatacccaagagtaaaacttggtcttggcctgtgggtgtgcagcccgtgggcgctggccaggcacacaagacggccgcctgggtcagtccagggggaggcagatgtggtgcaggggcccccctcctccatgagcccaggaacagctctgcatccaggcacccgccctgcacccagcacttttccttctcccaggactgctggctcgttctatgggattgaacacacaactccatggggaccgacgctggttctatccccctttcttacaagaccatccatggggatgtgggaggcggggacacacgctggttctatccccgtttcttacaagaccatccctcctgtgtcttggctcgtggatcggcttctaaggcctttgagtggcagcaggcggtacagcttatctgagtagaggtgaaggagagggccaggtccacctgggtggcccgaggcagtgtggagggccaggagaggagagcaccctccacccttgtctgagcagccctccagggtacggagacaggagttcagggtcagccctgccttggagcgcagggggcccccagcttggcacagctcctagaagaggagatgaaaaagcctggccttgggagtctggggatggagctttgctggggaggcagcgtggctgcaggatggcagctttttagaggacaccacggccagggacatccacccgggggaattctcaggggtcgcctgggcaagtcgcttagcctttctgagcctcagtgcctcagtttccccatccaaggatgggtgtgacaaccacctggcaggcgcctgtgtgtgagcccctgttccgctctaactcctctgctgttccttccccagccactgaggcggctcccagctgcgttggcgacatggccgacacccccagagatgccgggctcaagcaggcgcctgcatcacggaacgagaaggccccggtggacttcggctacgtggggattgactccatcctggagcagatgcgccggaaggccatgaagcagggcttcgagttcaacatcatggtggtcggtgagtcctcaccttgcatgccactcaaccaatgccggaaaccagcctcagcccccagggcggcccacaagcctttgggcttggtcttcccttctgtaaaatggggcagcaaccctgacctcaaggacggattgccagtgacattgcgtgtgcatgcatgcgcctgggaggagcccacagcctccagcggctcctcagaggggcctgtcctgcacatccagggcccctgagatgactttggggagcccaggccggcctggagcaggtcctgatgagtggtcgctgcctctgagcaatgacgtcagcttgtgcagagggttctgtggcagctgtcccctcactgttgctccagcctggccctccaggctccccaccgcaccccaccgcaccccggccagaggcttcccagcagctcagcttcagctctgccctggaattggggcctcgtggcttccacaccccctggtggccccggagagctggaggtcaccacgggaggtcgtcgatcagcacgacctgggcagggtgagggggccaggctggagtctacagtgggccgcctgttgtttccaaagccccccaggtcccattcaaacctcacagggaccctgtgaagggggcgtcccgttttccaggcagaagcgaggctcagggaaggctgccaaggttccttagctcacagggcagagaaccgcagccaccgttttgactcccagaactgtgttctgcccactccacggggtccagggaggggtctggggaagtgcccccgccaggtcacaccctaaacaaaggtgagcttgcggggtttctgcaaggtgtctgggcacctctcaggccgggcctgtttctctgacctttgccagccgtgcacgtccttcctgcccagctctgtggacgcaaacccacacctgccagcccgacacctttctttcctcttctgcactgatctgggccctggctcccctggggtcttggtgtcctctctgcttcctgtagcctcatgggacccggctgctcatggccctgctgtgctcacagctgcctggaagctggcagcctgcttcaagggagggcggaggtgtggggtcccctcctacggcccccaccctgttctgcctgttgtgggggacgtgcttgtaccctgaggattcagggctgcctcccgggaagatggctggagagaaagagaggggagaggcccaaaggcagtggccaggctgggactcatctctgtgggctacggaggggctgccctgctccctagccagggacagggtgagaaggacctgggaacctctgcgtcccagccatggcacaggccttcttccggagctttggccccaaggagagggagaggcagcccagcagccctcgccttccgtggctgccactgtgacagccttgccctctgggaatggtgcgcaggaggccacttcacctgtctgggcctcttcgccctttcaaccctgagaagaacagtggtcctgattccccacaaaatcactccctcccagggatgccgagtgaggaacaagacgtggggcagctctgctctcctccctcctccctcccatggcagctgtgcccacctgcagaggtgcaggcaaggtggaggggcacctgtttggaggtccacagaccccggggagaatcccagctttgtcctaactcagcggggtgaggcttgtgtgtcttcccctgggctcctcctctgtgagccttagcttcctcgtccataaaatgggatcatcccataaagtgagatcaagcgagctaggccccgggcagggtccccaacaggttgtggttgttcgagaatttgcagcagtggtgatggtggttgtggtgatgaggatgatgggggtggtaatgacggtgatgatgatggggtgatggtgctagtggagatgatggggatgatggtgatggtggtggtgatagtggtgggatggtagtggtgatgtgggtgatggtgattgtgatggtggtggtggtggtgatggaggtgatggtgatagtgatcatgagggtgatggggatggtggtggtggtgatggtgacagtggtgggatggtagtgatgatgtgggtgatggtgatggtggtgatggtggtggtggtgattgtggtggtggtggtgatgatggtggtgatgatggtgattgtggtgatggtgatggtggtaattgtgatggtggtggtggtgatggtggtgatgatggtgattgtggtgatggtggttatgatggtggtaattgtgatggtggtggtgatggtggtgatggggatgatgatggtgattgtgatgggggtggtggtggtgattgtgatggtggtgatgtgggtggtggtggtgattgtgatggtggtgatgtgggtggtggtggtgattgtgatggtggtggtggtggttgtgatggtggtgatgtgggtggtggtggtgattgtgatggtggtgatgtgggtggtggtggtgattgtgatggtggtggcgatggtggttgtgatggtggtgatgtgggtggtggtgattgtgatggttgtgattgtgatggtggtggtggtgatggtgatgatggtggtgattgtgatggtggtgatgggagtgatgctggtgattgtggtggtgaagggggtgatggtggtgattgtgatggtggtgaagggggtgatggtggtgattgtgatggtggtgaagggggtgatggtggtgattgtggtggtggtaatggtgatggtggtaaaggggtgatggtggtgattgtggtgatgtgggtggtggtggtgatgtgggtggtggtggtgattgtgatgggggtgatgatggtaatgtgggtgatggtgattgtggtggtggtggtgatggtgatgattgtgatggtggtgaagggggtgatggtggtgattgtgatggtggtgattgtgatggtgatgtgggtgatggtggtgttgatgggggtgatgatgttagtagtggtggtgatagtgatggggatgatggtggtgttgatggtgatagtggtgggatggtagtggtgatgtggttgatgatggtgctggtgctgatgattgtgatgacagtggtggtggtgatgagggtgacggaagtggtgatgatggcgggagtgatgggatgatggtaatagcagtgatggtattgtgatgatggtgctgatggggatggtggtgatgataagggtgatgatgatggtgatgataataataaaagtaacaataataaagggatacaccttgcagtatcccagttggcatctcctagatctaaggtgtcgtggctggaacattgacataactcctgacctgaggttggccaggacacagacctggtggacagagagagatggacgaggagtgtccgtccttgggctactaaacagttcaggccagggattcccagcaccagcctctgtcctcccaggagcccacacttttcctagaaaggtgttatcaaagtcagaacatcagtgtaatttagggtgttttttgtgttgtgtttttttgagacagggtctcattgttgcccaggctggagtgcagtggcatggtcttgactcactgcagcctccacatcctgggttcaagtgattctcgtgcctcaggcatgtgccaccatacctggctaatttttgtgttttttggtagagacagggtttcaccatgttggccaagctggtctcgaactcctgacctcaagtaatccaccctcctcagcctcccaaagtgctgggattacaggcgtgagccatctcgcctggccgatttttgtttttttaaaagacagggtctctgtcactctggagtggcaatgatcctagctcactgcagcctcgcactcctgggcttgagcaattctcctacttcagcctcctgcgtagctgggactataggtgctcgccactacacctagccaatgtttacattttgatgtagagacagggtctctctgtgttgcccaggctggtcttgaactcctgggctcaagcaatcctcctgcctcagcctcccaaagtgctgggactacaggcatgagccaccacacctggcctagggtattttttttggtgtgttgctagcgtagcccaaggcagctctgtgcagggtaaagcaatggggctccgagtctggaggggtgtgtgtgtgtgtgtgtgtgtgtgtgtgtgtgtgcgcgcacgcgcgcgcgtgttatatgtgatttgtttgtgtgtgttgtgagagttgtgtgtgaggtatgtgtaagaggtatgtttgaggtgagttgtgtgtgtgttgtgagttgtgcatgtgaagtgtgtgtgttgtgaggtgtgtgtatgaggtgtatgtgagttgtgtgtgttgtgttgcatatgaatgctacttcctcatcctcgtttgtctcagtcacctgtggactggctgtctgcacacacggtcactgtccctcgagtggcaccaccctgcaggccagcgccccctagcacatggccccacagaccccatgggacatgcgtgagcctgcctgatgctcacaccagctccacgggggaaggactgtttatcccattttgcagatcaggaaactgagacacggtgaggtcaggtgacttgcccaggccctggccggtcagggaggagcagtttgaacacctgggctttggttgcaaccaccctggtgaactgcaggaatcccggccacctggtgcaccctgggcagccctgggctcctccgccagcccggcctctgtcctgtccaaaatctgagccaccaggagacctcctgtccagaaagcacaaggggcacaagagatgccgactctcccaggcccggctcacctctcaggagaggactgtggcctgggttgtgctggcatcagagcccggctgtgtgggtttacacagtcactggacacccggctcgagggtgaagtcctcgggggctgcttggcagggatattgccgggaggtagcccaggcactgctgaatctcagactggagagcctcgtgcctgggtgggaggggccccatgtgcagaccctgctggtctctccggagagacccctgaccggcctcccatcctctccccagggcagagcggcttgggtaaatccaccttaatcaacaccctcttcaaatccaaaatcagccggaagtcggtgcagcccacctcagaggagcgcatccccaagaccatcgagatcaagtccatcacgcacggtcagtggccgggagtgggctgggggtgcaggacgcccctgccttcctggagcacaggggttgggggtcaagaccatcacacacagtcagtggccaggggcgggctgggggtgcaggactcctctgccttcctggagcacagagtggggggtcaagaccatcacacacagtcagtggccgggagtgggctggggatgcaggacgcccctgccttcctggagcacaggggttgggggtcaagaccatcacacacggtcagtggctggggatgggctggggatgtgggatacccatgccttcctggagcactggtgcggtgtgagggtgcccgagtcaggcaatcccaggtccccaagacggggactcgctgtgcccaccatccccagcatgttgagcatgttggggctctggctgtgatgggtcagtgtcccggacccctgtgggccccgtcacactgagctccccacagacaactgagttttccaccaaaagtctgacaggcaaggggctcccaggggaaccgtcaccggcctgtgccggagttggctgaggaaggccattaatttcccggtgtctccttggttgtcatcgctgcctacctggggttgccccggggtcagtcaggtgtggggtgtctgtgagggtcttccgtctcccctctgactctgcgtccgtggctctgtgcagatattgaggagaaaggcgtccggatgaagctgacagtgattgacacaccagggttcggggaccacatcaacaacgagaactggtgaggcccctccagggggaggagcactagcgggggcttcagggctccctggaccccacccagagtcagccctagaggtttcccggcccgcgggggtgcagggcccacctcctgggacctgacatgctgccaaagccgcacgtctcaggggcctgaaaattctggaccaaagcagaattacctggggaatcttgctgtccccaactcatcacctgaggccagcccggggaggctggtttgggaggccgagggtaaggctgtggcatctccgctcagcaagccagacctcccagggcatgcatttcattggaaggtggggtgttgggctctgagtcctgggaatgcacgacctgcttggggagggcatctcatgtgcctgctgactcgtccccatcccccacgcagctggcagcccatcatgaagttcatcaatgaccagtacgagaaatacctgcaggaggaggtcaacatcaaccgcaagaagcgcatcccggacacccgcgtccactgctgcctctacttcatccccgccaccggccactcgtacgtccctgcagtgtcggcgtcctcatgccgggtgccctgggttccctctgtcccctgggactgcaagacggtgctgtctgccctgctgctgggtgcagaggggctgagtcaggggccatggccgccagctatgaagttgggggtgtgccatgtctgcacctccaaagcctcacactgacccctatgcaagtgtcctgcccagcccccatccttcagctgcgtcttggggagctgagggtcaggcaggccctgggctgttctggagcctggtggtctgtgtcctgccttctcaggccaggctctggcaggtggagtgggagcccccagccaagcacccgtagcggtgactgaccttctcatccgggccctgcctcatgggaccccttagagggtttggtgcgttcttagacgggaagcacagagatcagtgctggccccttccagggctggacggggctgctgttggtgttggtgagagccctttcctcccgccggctctgtccgcacctgacgtcgcccctagagatcagcaagggcgggaggctgcatgtaccctggcaggtggactcttcatggcctcacggaccctctgtcctcagctccctgtgcaccccctgccagacacctgtggctcaccctgagccagggctgggaggaggaggaccagaggccagcaggagtggctggtggaggcagccgtgggtggcttgtctgcatgggtgggtggagaaggtccttcgcacctgctgtcccagatgtacttccctgggcggaggaagcccaggggtttggggaaaccatactctgtgggcaccaggtgcaggaaggagcctggctggtgggcagcgggcctcacccagagtctgtgggaaaacccaagccggagttttcgagcccaccctctggcatcatcctctgtgggccagcaggagtcaggggcagggggccagcccgctgtccatgggcctctcctgaactgaacatctgccctcccaggcagaacggctcacctgcggtcctgtggcagctgttccagctgctccaagctttgcctcagctgaggctgatggcaggaggcagaagcctctcctgatgccagctgggcaagccgagggcgggcgggcggtctgtggcacttctgccactccccagcactgaccctttggctgggactccagctaggcatgttgcctggtcccgcccaaggcgtccagtcccatggggcaggggcgggccttggccatctctgcttaaacttctgcccggagcgggcttctccccagccatgtgtgtgaccgatttattctcactgtgggaaaagctcggctccagaactggggaagatggtgccccagttccagggccctgccagcccctgccacccacagctttccccacatcagaccccaggctcactggggccaagcaggcaaggggagcagcccgcctggtgcaggggagcagcccgcctggtgcaggggcaccgcacactggtgctagcttctatttctcttgcctctcccctcccagccaaagccccacagcaagacggctgctgagccaacgacagcccttctgtgtggacatgtaggggtgtggttgggaccccagaactcatggacgagggtgcttggagctggccctggcccgcctggcctgtgcagtggtgtcacctgtgtctgggacacacccgtgtccttcctctgccccacactcacagcgtggccgactcggcccggggccctgtccttgccagcagggacccccgtgagccccgagccagcacctgagagtgtcgacacctgcttgggggtgggtgcccccccactgccccgctcccccagatgagcctcacgcacatccctctgcttcagcctcaggcccctggacatcgagtttatgaaacgcctgagcaaggtggtcaacatcgtccctgtcatcgccaaggcggacacactcaccctggaggagagggtccacttcaaacagcgggtagggttccatctctacttgccccagcccttctgtgcaacctggagacgctgcaggcctggcaggggccaccccgtctaaaggagtcacactgtcagggagaccgaaccgctggtcactctccccagcgggtggctggcctggtggtccctggcccaggtggctgctgggggccgtccctgagatggcctctccagctcccccatatctcaaaagcagctttgtgggagtgccaattctccagcagagtctctgaggggggttttggagaagacctggaccaggcagatggtgaatctctcttccagggagtgaggccgagcaggggccgtgcgacatggcccaccttgttttatgccccccctttttttttttgagaaagggtctggctcagttgccaaggttgcaatgtagtggcacaatcatggctcactgcagcctccacctcccaggctcagtccccgagtagctggaattacagacgcacaccaccatgtctggctaatttttgtatttttagtagagacgaggttttgccatgttgcccaggctggtctctaacccttgggctcaagggatcctcctgcctcagcctcccaaagtgctggggttacaggcatgagccacctcacctcgccctgcctggtttttattagatggaagagaagctgggccaggtgtggtggctcacgcctgtaatcccagcactttgggaggccgaggcgggcagatcacttgaggtcaggagtttgaggccaacatgatgaaaccccatctctactaaaaatacaaaaatattagtcgggcatggtggcgggcgcctgtagtcccagctacttgggaggctgaggcaggagaatctcttgaacccgggaggcggaggcttcagtgagccgagattgagccactgcactccagcctgggtgacagagcgagactccatctcaaaaaaaaaaaaaaaaaaaaaagtttcaggagggatggtctctgccaccttcttctccgccaccgtctgaggcccctgctgtgggatagggaggggcatccaagcaagagggcagccctgggctcttcctcctgacagggcagcacatcagagccacatggggtgcctttcaaaatgaaaccgaggtgcctgggctgcggcaccacatctgcctcggtgggtgtgggtggggcctgtaacctactccgtcctggggccaggtgtcagggaccttcccagcatgtgcaggggaagacagtccacacaaagtgggtgtgtctgccggaggctacacacgggctgtggtctgtgcctgggcaggcgagcagccgctcactgggatgtttctgttgcacgtacccatgtcgggctgctggcagggagctgagaggttactgcaggcggggcccctgctggaactggggactgtgacgagggttttttaggaagggtttcaggaggggaggtctcggtaaccctgagtactttcttggggctgtgatgagcaggagaagagaggtgggaggtgctcaggacgatgaccttaagcccctggggagttgcagcgtcgctcaggacagcaggtgcacctgcagctgcccctcttccctccaggaggcacaggagttggaggtgattggtgtcacagccccccagagcctgcccttgaacccgagcctggggcagcacacagtgtggaggtcatgtggcaaacaccagtgggtgggtagagcttgccacagggatgggcccatctctctccctccttatcccagatcaccgcagacctgctgtccaacggcatcgacgtgtacccccagaaggaatttgatgaggactcggaggaccggctggtgaacgagaagttccgggtgagtggatccactaggatgttgttcccaggggacccccagttcctgctgaagggtgggttgggggtttggaggaccttaagccatgaaattatattcttggggccagagggcactgagcccaggtgtctgtacccagtgctgtcaggctgaggctctcgtttttgggggaccccaggctcagggcagctcctcccgggggcccaggggagggaattgccttcccgcacatgtgtaaccaataccgtctgcccgttccccaggagatgatcccatttgctgtggtgggcagtgaccacgagtaccaggtcaacggcaagaggatccttgggaggaagaccaagtggggtaccatcgaaggtactcgccgcaggcgccggggctccagacagatgggaagacagtctcttctgctgacccagagcctgtgggccacgcctgagccagggactcgtggaacctcatccactgccttgccccacccagagggaggggtctccttgtccccattcaacccttgggaaagtgagagggcaagtggcctgtgcagatgcctccaccccagacctccccccgggcagggaaagattcagggagacaggagctgggatgggggccgccaagttctggatcctggtgcaggctctttcataggcacctgtgtggccctggacaaatcgcccaacctctctgggcctagaaaaggggtgggctgtagctctgtgagccagatggaccctcggccccttaccctgctgaagttcctgggaccctcacaccttagtctcttgagtggctgttgtaaccaattagcacaaacgaggggacttaaaacaacacaaacgtattttcacagttccagaggccagaggtccgaaatcaggggctgtttccttctgaggccctgaggaccagcctcatccatgccttcctccttctggtggcgcctggcattcctagttgtattgtaaaggcatcacatgctctaatctctgccccattgtcacagggccttcttccctgtgtctctgtcccgtccctcctcttcctttttttttttttttttttttgtttgagacggagtctcgttctgtcacccaggctggagtgcagtgttgcaatctcagctcactgcaacctctgcctcctgggttcaagtaattctcctgcctcagcctcccgagtatctgggattacagtcacgtaccacccacctgacttaatttttgtatttttagtagagacaggatttcgccatgttggccaggctggtcttaaactcctgacctcaggtgatctgcccaccttgcttggcctcccaaagtgctgggattacaggaatgagccaccgagcctgccctctttccttcttgtctttggacaaggatgcctgtctttggacttagggcctaccctaagtggatgatcccatttggagatccttaatgaatctataaagaaagacgttttccaagtaaggtcacaatcatgggttccaaggcctggaccttgaccatgtctttgaatggatgggagcccctggggggccacagttcaacccactcctggcggtgacaccccgggagggatgggcccgaacgtttccttccccttcctctctctgtcccttcatttctcattagaatggaagaggggaaggtgcagagggaaatgcagcaggaaaagccactttgttctgggagagcacttggctgaaaggcccagtagagcaggaagcacaagtctcttaatcttccagggcctcagttttcatcatccacaaagtgggtgcagtgtgccaagattttagtgagttgagagactgtcccaaagaccacagagctttttgggaagctgttgctctaaaaaaatggtcataatgacaattaccaggaggcatcagacactcctgtgccactggctagacatgggttatctcgtttcatgtccgaagctccccgcacccaccctccttgcagagttgaagaggtgctgtgagcagaaaacctgccaagggacccagaacgggaggcggctctagaatctacagctccagccctgcaccagactccctcgagatgggagttcatgcctggaggagggtgtggagaggcacacgggcctttcccctgtctgcactcctcccctaccaccacccctgccgggcccaccctgcgggagctgcccagctgggtgcagcctgggtgttttccagtatccgcctgtggtgtcaggctggcttgcctccccttggcccctctgcctgcagttcctctcttcctctctgcccaaagagttcttgctgtttaggaaactttttatgaaaggcaggtttgggagagttagggatggatgggcctgggacgggccggcggctttgctatgggcgtgcctctgctgcaccctggtggccaaccttgagtaccgcaggtggccggtgacagaaactgtcaggaaatgcacaagagagaggtccccgcacctctctgacctgtgcgttgttgagcaccactggctccagctgaggaagagtctggaacctgtcaggacagttgtgaggtggtggggcccactttccagcagtcttatatgaggaccctggaaatgtgccttcagcactgctgggtttttatatcaggggccccatgagttcatagctgacctgacacccggactagtaagggctgtgccttgttcttgcctcccacttggtgaacagcatcttgaggtatctttcccatccttagaaaccaccccaagtattgtcaatagaaatgtggggtgtaattgatcacgccatgaactcatttaatcctcatgtccctgagaggcgggtgacgttattatccacattttatggatgaggaaactgagggaatgagagtaacttgcccgagccagggagtggcgatcacacactccaactccagcctgagagccccattcttcctgccggctctcgctgcccgtcagtgttagatgagagtgctgctggtcagtctgcaggaggttctagtgtggacaccgccctacacagggccgtggcaggagggcctaggcaaaggcaaccggcatagcactgagagcacttgagggctgggcaaggtggaggccccggccctgcctgctggcctaccaagtaaaaactagacatttttaacttggggaaaagccatgtggctctgcgatggggcagcctggagccaggtgtatgggttctgcatcccgctccagccttatgcactgtggagctgagacagacacagttcttgcgttctctatgcctcattttcttttcttttctttttctttttctttttttttttttttgagacgaagtttcactcttttgcccaggctggagtgccgtggcgtgatcttggctcaccacaacctccacctcctgggttccagtgattctcctgcctcagcctcctgagtagctgggattacaggcgcctggtaccaggcctggctaatttttgtatttttaacagagacgagatttcatcatgttggccaggctggtctcgaactcctgacctcgtgatccacccacctcagcctcccaaagtgctgggattgcagacgtgagccgtggtgcccagcgtctacgccccattttcgtaagataatggggataacaaaggaatcacaagagacacttgcaggtgtgtgaagacgaagttcatcacatgggagggcaccgggtgtctttatttgccttccctgcccggctccccacctccagtgatgccgttcactgccctccttgttaaaaggccttctgttatataacagttacacatgccaggcaccgcgtgttcatataggagttacgaagcacagcaataaaatgaccactctgagatggccaccagctcgagcccgagggcacttgtgggtgcccgtggtctcctgcccagtctccctgagaagtggccactgtcccgagcttgggcttgtatgtattgtgtgaagtgcacatgtccctgagcaatgtttagcattgctgattcttgagcttgtgaatggtcgtccacagtacgtagcccctgtgtgtgtccctgtgtgtgtgtgctctgagcgcacacaaggtggatggggccgtgggggtaacaccctgtgggccacaggttttctttaaaatcccagctccgattcctgcttcatcccattcccagcagcccagccccctgcctgtcttcaggcccctgctgggacgtcctgctctccctggtcaccccagtggtgcgggggcccactgccctggcttctccactgtggcttccttccatgctcctatttggcctggtcactgtgccatctcccattagccaggaactttctggagagcaggagctgagctgtccaggagcaggagctggtgctggtcactccagtatcccccagactgagggcagtgccaggtgtcctatactcagctgcagagcaggtggttcccctgccctcctgcccatggggctgccctcagactctgcttttggcaccagcatttctgggcagggggagagaggtggggtccgggcagagtttctccactgggacattaaagcccctcctgtctcctctcctagttgaaaacaccacacactgtgagtttgcctacctgcgggaccttctcatcaggtgagagacagggtgcttgggtggggctgacggcttcacccctaagagggccctacagcgggtgggggcagtgggtgtggggccgaagccctgggcagagtgggtgccccctgccacctgcctgccctgccctcgggaagatcttggaagcccatcttctgaaaaagaaaacccactgggaaatgaagcaggcagtgaagatccttttcaacccctgcgaagttggctggatgggaaggctgagctttgatccactgtggtctggcccgttagagctgcccggtggccactaagggcccagtgaggcctcatgtgcaggccctgccggcagcgtggggcgtctccagctccgatcccactggcctctgacccctacccctttcacctggctgaggcttctccttgtttcccttgagtccaggcaaggaggggaagccctgatggagagggtgctgggtgggtggtccctggagtgtgggccctggcctgggcaggttcttcctcagcaagcagctggcatggatgatgggaatgttatcaagaggaggggcctccaggttggcgggggcaggggtggggggattccgggagccgttctgccattgtggggatactgggctttccaacctccctccagattattcctcctgagctgcagaggaatgaaaatccgagcccaggacttttttttcctggggacaagggcaacccagccctttgccccaggccacctgcctgccacaggccatagtcctggaggccggtggtcacccactgcttccaccctgccagcaccctggacaccggcctggagcaacaatgctccagccctgtccctctgagtctatgcactgtccctgggccctggacccagggccatagggtggacccagagggagacacatgcactggaatatgtgtgttctgaccgagtctgggcttaccagggggactgacccttcccccaaaacgtgtaccagatctggtccaacatggtgggcctgggggaccccatggggagccaagcagtcgggatggggagtgggggtgggggcaggcgggcctgagtccgaggcaggccgagcagggcccctgccccgctgcccccaccccgctgcgcccacctcactgacccgcccgccccccacccccacaggacgcacatgcagaacatcaaggacatcaccagcagcatccacttcgaggcgtaccgtgtgaagcgcctcaacgagggcagcagcgccatggccaacggcatggaggagaaggagccagaagccccggagatgtagacgccaccctgcccacccccgggatcctgcccccaagtcatttccgtccccccccaggccctcccaccaccccattttattttatatgattttctccatttgtcatcgttccccaccccttcgacatgctgccaggaaacaagggaaggggcctccctccgagtgagtcagtgatgaggccgcggcctccccgaggttgtggggaggctgcactggagccacaggcaggggtgagagcacccactgaattgacatgaccctctgtccccaggcctggctccccgagggctcagaagagcagcttcggtgtgcagatcatccgtctgtgtggggttctcagtgccggaggccttggggtgggggccaggcctcgcacttgcagaggagcccagtgggctgcacgctcccctccatccccatcggccctgtcccctggagtgtgtcagagcccaggggagaatgcagcccaccaggagcacctggaccccctgcccgccacatggtgtggccatcactcagcccctacccctgccctgctcctaagggtagaaaactccagggtcccctgccaccgactgcccagccactccaagccccctggcagctgcccctcctggagcagaaagtgcctttatctcagccatccgcagactgcttggccagatgcggggacaggctggaatgagggaggcgtcttcatctccctgccatccccctctcacgccacccccgcccccaccgggctgcaggtgctgctgatgcgctgggatctgattgaggataaaaaggaaggagagatgacccctaccccctcatcccccagttttgaaaaggtctaagcaagtgagtctggtggaggagctgagggagggagccatggaaggtgccagaaggaaggttggcgggggcacgtgtgggccgtggcttgggctggtcagagtggcgtgagctgcccggcgcctgccctgcccaagtgaccagggaagtgtgtgtgtgtccatgtgtatgcgtgtccgtctgtctgtctagtgtctgggtttggcccaagactgggctgtagttacattaatgcccagccagccacccctgccactcacccttcctggcccaggccttgctgactctctgagctggggaggtgggaggccaggcgagcctgactctgttgatctacccgtgcctgggcccctcccctcagagcccatggtaacgaacccctagaaaggagagaacgggcgtcaggggtgcacagtccacagctgaagagcaaggtttcgtggcagcacggcccggcccctcaccctctgtccccacgaggggacccatgggggctgtctttgcagggcacagatgaccaaagtcccttcctgcttcctgttacctgtcttgctcctggggagaaagaggggcctgatgagactccactcaggtgcacacatcaccaggtgcatctgcaggcaccgggctggctgcttgcagccaggagaaggtcagcgagaaggagtgtatgagtgtgagtgtgtgtgcatggaagttggggcactgggcgtctgactccctccccacccaagagaggaaggacccctcaccacccccactggtgagacagtttactttgccaacttgccatgtttttgccaaaaccaagattttgaaggaaatgagtggccagcgccagggcccaggccatgtggcctgcccagcctcaatgtcacttggtggcggggtggggtgggggtgggcagcagcatcccagccttgagatgcttcactttccttctctgtaaccagactttgaaaaattgttcgtttcatcaggctctgttcctcaatggccttttgctacgtgcctcccgagaaatttgtctttttgtataaatgacaaagtgttgaaaatgtatttcctgaaataaatgtttcaaatgcagaaaccca

SEQ ID NO: 2 - DNA, 1405 bp, Homo Sapiens
cgttacccgagttgtaaagggcggctccctgtgtctgccccgctgcaccgatacaccgagctgcgcacggtgcccagcgcagggagaacaaatgatcatctgtccaacgcgcccatttacaggtgaggaaactaaggctccaactcaatcgacgcactctgcccttttgattaccagaaaagtagcaggacaggtgtcctgtcccgccctaccccggcccactaagccggcaccccggctccgacccccggctgtgcccggcgccgccgcggtgcccggcgccgccgcctcgcccggcggggccgcccggagcgcccgcacctccgcccgcttccacctggccgggcccgccccgcccggactcgggactgggaagtgcggcgactcccggaaccagccattggcgccagcgcggggagctgggggtgcagagctgcgggcgcggcgggccacgcaggcggcccccacccccggcctggcctggtctggtctggtctgcgctgccgcgcgggggcgccccctcccaggcccggcgcccgccagccccgctccgccaggtgcagcgcagcgcaggggtgggcgggggtggggctcggcgcgcacgttcacggggcggggagggggcgggtcaggggcgggaccacagccggctgggccggggttctatgcgcatctccggggaggggcggggcgggggcggggccggggcggggcccggtcggtgcactccagacggcgggccgccccctcttcccgccttcctactaccggcccaggattagcgccctgggagcgcgcgccccgctgcctcgccgccacactttcctgggagcggcggccacggaggcaccatgaagaagtcttactcaggtgggcttcgcgcccggggtggggaggggtcggtgtcccgggaccagcgctgctcacctgagtgcctgcggccgggagtggcgaggcgcccccggagctgagcgagtccccgcggcgggcacactgcaggtcgagttcctcccaggacagggccgctgtcgggccgctttcgacctgagccgaccgtcccctgcgctgtctccagcccttgctcgagtgtcggaggggctgccctgggggacgctccctcttcctcgccccttgcaccctcgcaggaatcgctgactttccaggtcggccgggtgctttgggtccctgtgcgtctgtgtgggtgaatggggtcggggctaggtggaggggtgtccttgggttcagcctctagggctggtggtccaggccgcagcatcctttcttcggattctcttcggtttctcctctacttagtggggcacgggacggcctccagatgggaccgtccagcagcgcccaaacttggcgactcgggttcacgttttgcgctcaggacgccgcccgc

SEQ ID NO: 3 - DNA, 2365 bp, Homo Sapiens
gtggtcgtggtgggggtgttagctgcaggggtgccctcggtgggtgggagttggtggcctctcgctggtgccatgggactcgcatgttcgccctgcgcccctcggctcttgagcccacaggccgggatcctgcctgccagccgcgtgcgctgccgtttaacccttgcaggcgcagagcgcgcggcggcggtgacagagaactttgtttggctgcccaaatacagcctcctgcagaaggaccctgcgcccggggaaggggaggaatctcttcccctctgggcgcccgccctcctcgccatggcccggcctccacatccgcccacatctggccgcagcggggcgcccggggggaggggctgaggccgcgtctctcgccgtcccctgggcgcgggccaggcggggaggaggggggcgctccggtcgtgtgcccaggactgtcccccagcggccactcgggccccagccccccaggcctggccttgacaggcgggcggagcagccagtgcgagacagggaggccggtgcgggtgcgggaacctgatccgcccgggaggcgggggcggggcgggggcgcagcgcgcggggaggggccggcgcccgccttcctcccccattcattcagctgagccagggggcctaggggctcctccggcggctagctctgcactgcaggagcgcgggcgcggcgccccagccagcgcgcagggcccgggccccgccgggggcgcttcctcgccgctgccctccgcgcgacccgctgcccaccagccatcatgtcggaccccgcggtcaacgcgcagctggatgggatcatttcggacttcgaaggtgggtgctgggctggctgctgcggccgcggacgtgctggagaggaccctgcgggtgggcctggcgcgggacgggggtgcgctgaggggagacgggagtgcgctgaggggagacgggacccctaatccaggcgccctcccgctgagagcgccgcgcgcccccggccccgtgcccgcgccgcctacgtgggggaccctgttaggggcacccgcgtagaccctgcgcgccctcacaggaccctgtgctcgttctgcgcactgccgcctgggtttccttccttttattgttgtttgtgtttgccaagcgacagcgacctcctcgagggctcgcgaggctgcctcggaactctccaggacgcacagtttcactctgggaaatccatcggtcccctccctttggctctccccggcggctctcgggccccgcttggacccggcaacgggatagggaggtcgttcctcacctccgactgagtggacagccgcgtcctgctcgggtggacagccctcccctcccccacgccagtttcggggccgccaagttgtgcagcccgtgggccgggagcaccgaacggacacagcccaggtcgtggcagggtctagagtgggatgtcccatggcccccatccaggcctggggatatcctcatccgcctcccagaatcgggccgtgggggacagaaggggcctgcgtgcgggcagggagagtattttggctctctcctgtcttcggggtttacaaagtgtgttgggacttgcggggctgctctgtccaagcctgggtctggcgtccgcgtctctgagcctgtgagtgcgtgcgctttcctgcgtcctcttgactgccggtgctggggctctgcgtcctgcgtccgcgggagtaaatacagcaggcgaaggggaagctcacacaatggtctccagcgctctggggcagggcttctgaggggcgggcctgcctctgccgggacctggagcccccgcccctcggagaggctcctaggctgacttgggcagagccctctggtgggccgggagggggaaaggctgtgttgaaatgagcaaactgtccaggtgtcaggccaagctgggaggtgaccagcctgaggtcctccccgctccatggccagaaccagggctgacatctgggtgtcctgagcccagctgcccacacggcccacctggggtcagccctatctgagtgggggaggcggggcctcctgggggaccagaactttggctggacgccaagcagagtgccagtggctgttcttcagggctgggcctgaggagggtgtggggcggcgaagggacgggagggggttgtgatccagtggccactggcgctgtgcagagtgtgagctggaaacatcgtagttactttgtcagcttagtggtgaaagccctttttcaggctctatccctttgcatccctgcttcccagagggaggggaggtctgggtctgcagagctgggagggcttgctgttcccgcccccctcccccacaacacctcctcatctggacatctttgggcacatgc

SEQ ID NO: 4 - DNA, 219909 bp, Artificial Sequence
  chemically treated genomic DNA (Homo sapiens)
cgttattcgagttgtaaagggcggttttttgtgtttgtttcgttgtatcgatatatcgagttgcgtacggtgtttagcgtagggagaataaatgattatttgtttaacgcgtttatttataggtgaggaaattaaggttttaatttaatcgacgtattttgtttttttgattattagaaaagtagtaggataggtgttttgtttcgttttatttcggtttattaagtcggtatttcggtttcgattttcggttgtgttcggcgtcgtcgcggtgttcggcgtcgtcgtttcgttcggcggggtcgttcggagcgttcgtattttcgttcgtttttatttggtcgggttcgtttcgttcggattcgggattgggaagtgcggcgattttcggaattagttattggcgttagcgcggggagttgggggtgtagagttgcgggcgcggcgggttacgtaggcggtttttattttcggtttggtttggtttggtttggtttgcgttgtcgcgcgggggcgtttttttttaggttcggcgttcgttagtttcgtttcgttaggtgtagcgtagcgtaggggtgggcgggggtggggttcggcgcgtacgtttacggggcggggagggggcgggttaggggcgggattatagtcggttgggtcggggttttatgcgtattttcggggaggggcggggcgggggcggggtcggggcggggttcggtcggtgtattttagacggcgggtcgtttttttttttcgtttttttattatcggtttaggattagcgttttgggagcgcgcgtttcgttgtttcgtcgttatatttttttgggagcggcggttacggaggtattatgaagaagttttatttaggtgggtttcgcgttcggggtggggaggggtcggtgtttcgggattagcgttgtttatttgagtgtttgcggtcgggagtggcgaggcgttttcggagttgagcgagttttcgcggcgggtatattgtaggtcgagttttttttaggatagggtcgttgtcgggtcgttttcgatttgagtcgatcgttttttgcgttgtttttagtttttgttcgagtgtcggaggggttgttttgggggacgttttttttttttcgttttttgtattttcgtaggaatcgttgattttttaggtcggtcgggtgttttgggtttttgtgcgtttgtgtgggtgaatggggtcggggttaggtggaggggtgtttttgggtttagtttttagggttggtggtttaggtcgtagtatttttttttcggatttttttcggttttttttttatttagtggggtacgggacggtttttagatgggatcgtttagtagcgtttaaatttggcgattcgggtttacgttttgcgtttaggacgtcgttcgcggttgatatttttattttattttagtagggttcgttttaagtaggcgaagggggtttgatttgggttttattatgagtcggtttaggagtttttattttataagaggttttcgttttggtattttgaagttttattttatagatgggtatatcgaggttataagggtaggttaagagaaatttagatttttattatttgtttttttttttttttttttttttttttgtggttttttttaaaggatttaggtaggtaggattttttgttttttttagtttttaaattataaatagcgtttttttttttaaatttagaaatcgtttgtttaatgttttttttttaatttatttagatagaaaggtatttgttaaggatttatgaattaatttttattgataggagaatagaattatgggttttagttggaggtgaaggagttatcggggttatttttttgtttttgggttattgtcggttttttttggttttttatatttaggaattaaaatgagtgataaagtattttgttttaaagaggattatttagaattttttcgaaaatatttttttgggttagtagtttagaattttaatttttattcggttgttgcgaataagatggttttttacgtattcggagtatagttttgttaggagcgtgggtgggttggtgtgttggtgggcgggagcgggtttttaggtggtatatgtttggttttggtatcggggttttttttttaatatgttttaaatatttgagattgttgtggggatcgcgcggtgtatggttttttttaggggatttttagttcgtttagggagggttttttgtttttggttttttatattttattttttattggtgggtttagatagtgggggtgatcggggtttttttaggtcgtgggttttgggttttttttgcggagatttttttgtatagatgtcggaagggttttgaggtaggtttggagtttttgtatttgcggtttattgggaggtggggagattattatttgtttttttttttttttttttatatatatttattttattttttattgggttttttttttttttttttttttaaaaaaaaggatagaattttttgtagtaggtggaagtagagtttgtggagtgagtaggaattaatttttgtatagtagtttcggtgtttttttgtgtttatttaaaggggtaggtttttttgaggatgggggaagggagggtttagattatttttggtttgttttttgtttggtagtggtttaaggtgtgttgggttattgtgttgtagttgtatggagtgggattggagggggttgatggtgggggtggttttttgtttttattttgagtgttttggagttgttttggtattagttttttttcgggtacgggtattcgtaggagttaggttgattttttaataagttatcgatattatgaaattaaggaaagtagtaaaagatgttaaaaattttttaaggttttgataatttaaggataataggaaggtttttatttttttatttagattgtgcgggattattgtttttagatttgtatgtgggttttagaataaacggaatgattataatgttgttttcggtagatttggtttgaatattcgtgagtttttgaaaaggagaaagattttagaaggatgtgttggggtaattttaagtatcgtgggtttatagatagttatcgaagatattttatgtgttgggtatatatggttaagtttgagtgggtatagaaatggtaatgagatatagtttttgtttgtagagaatttatatttttatcgggagttaggatgagggcgagatattagtttattaatattttttttttttgagtagtttagtttttaaatattataggaatgtttcggaggttttaggtggaggtgagattgagttgggttttgaggaaggagaagttttgagtagtggagaataaaaagggatttggttaggtgcgtttgaagttttagttatttaggaggttgagatacgaggatcgtttgagtttaggaggttatttaggaggttgagatacgaggatcgtttgagtttaggaggttatttaggaggttgagataggaggatcgtttgaagttaggagtttaaggttgtagttttgtgatagcgtttggaaatagatacggtattttagtttgggtggcgttatgagattttatttgtaagaaggttttttttaatgcggaaggtagtaagggtttatatagggtagttgtaggatttagggggatattggggataggttttttttggtagttttattgttgttttaggttttttcgattgttttattcggttttttaatggggtggaggtagtggtagtttataggtagtgtggtttagtggttatatttgggggtttagagtcgttagttttttgggattaaattttattaggttgcgtttttttttgtggtataaggtttttattttatgtattttatttgttttatttgtttttttgtgtgtgtggtgttttttaattttatttatttatttatttttgagacggagttttattttgttttttaggttggagtgtaatggtatgattttagtttattgtaattttcgttttttaggtttaagtgatttttttgttttagttttttgagtggttgggattgtaggaacgtgttattgcgtttagttaatttttatatttttattagagatggggttttattatgttggttaggttgatttcgaatttttgatttcgtgatttgtttgttttggttttttaaagtgttgtgattataggtatgagttattacgtttagtttgttttatttgttaaatgggatagtgttatgttgttgtaaaggttaaacgagtttatatttgaaaaagttgagaaatgtttgttttgtaatttgttagttgttgttatgattatgattgttattgataggaggatggagaaggttggggttacgttattgttaggacgttttagaagtttttatgatttttttttattgtggttagagtatggtgtagggttttttttttagttttttagtattggagttagttgtattgtattcgttttggttttttaggttttgagttttgggattttttttgtatattaggttatatggaatttgtcgttatttttaggtttttttggaaattttttgtgggtggtagcggtaggaggatttattcgaggtcgatgagttatagaagcgggattgaggttgcgttatatttttattggtatttgggaattattttggagattttttttttattttttatttttttgagatggagttttgttttgttgtttaggttggagtgtagtggtacgatttcggtttattgtaatttttgttttttaggtttaagtaatttttatgttttagttttttgagtagttgggattataggtatgtgttatcgtgtttagttaatttttgtattttttagtagagatggggttttattatattggttaggttggtttcgaatttcggattttaggtgatttattcgttttagttttttaaagtgttgggattataggtatgagttatcgtgtttagttattttggagtttttttgtggtttttaggagatttttgaaggggtattagttacgattaaaaagttttatgttgtcgtgatttttgagttttgggtagggagggaggttgtatttatataggaagtagtttttgtcgtgatttagtgtgttggttcgtcgtggtggatagggttgtatttttatttagcgtttcgggagttgatttacgggaagggtaaggaattgtatttttagagaatatttttttagttagttaattcggtgataggcgagcgtgggaagggtataagtatagggtttttttttttttttttttagtttcgttttcgcgtttgttttcgttgttttttgtttttttacgtttaagtttgtttgttttggcgtatttaggggatttggattggagagaaaaagttatttcgtacggttagtttgtggttttgtttgatttgtgtttttcgtcgaggttttttagttgtgagatagttggttgagtttaagttttggggttagttttttttttagtttgttgtaaaggtagaaaggtatgtttaggtaggggttatttgttttgttcgtttacgttagatcgtaggtatttgttcgttagattttttcggtttgtttagagggattttgatagtcgagggtaatgtatttggtagcggagtattgcgtttgcgatagtttattttttttttggaattattttttataagtgtgattagtttaagttaggataggtatagggggatttaggattgttatttaggggtagtggtttggaatttaggtttaggtgatatgggagttaattttttgtttggagattttaggtgggtgtttgtagaggatattttatttgaggatttatggaaggggatattttttattttttatttggtttttgggttgtttttttttgatatttttttgttattttaggtagttttgatagttttatgtgattgggatttagaggtggtttttgttttcgttttagtgtttgtttataggtagtgttgcgtgggttttgaagtttgtttaagatggatttgataaggggagtttagtatatattagtgtaggttcggttagggggtgatgatggtagtttttgggtagatttagttggttttagggtaggaggggttttagagagaggttttaggtttttaggggtgtgaatttttggggtgaggcgggaagtgacgcgttgggtttttgcgtttttgtttgttggagttattattttggaaatattttagttttaggcggttgttagggatttatggggattagtgggtgttaatttttgggtgaagttttcggggtttgtatatagtatatagcgttgtggttttatggtttattttgttgtgtgaagtggtttagttttcgggagagtttttagttaggtaggtttgacggtaattgttaggttatggtgatttggaatcgttgattaaagggagttagttttggtgggtggagggatttggtgggtagttatcgtgatgttaggtatggggatcgtgtgttatttaggtttgtgggtgtcgagtttttgtgggagtagtgaagtgttttcgtggtcgatgggttggttatttttgttttttttttgatgtgatagttgtgtttgggtttcgggaaatttgttaggaggtttggtattggtttgttttattggagcggttttgttgagttgtgagttgttcgtttttttgaggtttttagtttattttaattttttatgtggatttggttatttattttagaagcgtttgtcgggcgttgttgagtgttaggttttgtttgtttttttttttgtacgttggaggttttgggtattagttttgtagggtggtttggttttgggtttttagggtagagtatggtattttttgtttttagtttagtttttttttgttttatttttttgattttattttgggtatgggtttatttgtagtttttgtgaagggagatattgagttgttgttggtagaggaggggcggtttttgggtattgtttgttaatggtttttcggtagttttgtgatagttgagttttgtttttagtttaatttgatttggttttttaaagtatgattgttggtagtttgaaaatttttaggataggaaataggagtggcgtagggaatgtaagatgattttagttttaagttattgggcggtttttagatttaggttgtttgttgtttttggtaggaatttaagtcgttggttatttttagagcggtgttggttcggggtttttagtggtttttgtgtttgggtgagaggaattttggatggttattttgttttgagtgtgtgggtttttagaagtgttgggttagggggtacggagggttagaaagttttttttggagcgttggattttttcgttgatttttattttatttcggtttggggttttagagaaggggtttaggtaggagtgttatttttttttaatggggatgtggttttagtttttgtttaggtgggtgtattgtttttttttcggttttttttaggttgtttaaatgatttgtgacgaggtttgcgttatggtcggggttttttgttttttttagcgttgtatttgggaattaggggttgggtttcggaagtcgaggatgtttttgaatgttatgtttgggtatttgttttggttaggcgaggcgtgttggggtagcggttgagatgggagtagtagtattgtttgttaggtttgagatgggtttcgggtgagtgtggttattaggaagggttgggtagagtaggcgggtgggtcgtttttggggttttgtttcgtagattaatttgattcgtattttggggtcggggtttttttttatagtttttttatgaattatggtttttgtttttattttaaattagattttagaagaggaataatgtttatgtaatttaagttagttggaagtgggttatatttaatttttgttattttttagtttgttaaggatttgattaatttaatttagagggatttggagggttgtttgtaaaatttattaataatagggaattttagttttgtagttatagggtttatagaggtgtcgggttgtcgggttattgttgggaggtgagtcggtggcgtagatattatggaggtatcggtagtggaagagttgtaagtgtatatagaggtcggtatcgaggggcggggaggaggaggtggtggatttttcgttagtgttggtattatgttgtttttagtattagagatttaaggtgtggttgattttggttggggcgatgagttattggatagtagagtttttttggtagttgggggttaacgttttaattgtcgggattttgtattatgtcgttttttttttttgttttgtttggtttggtttggtttggtttttgagacggagttttattttgttatttaggttggagtgtggtggtttaattttggtttattgtaatttttgttttttgggtttaagtaatttttttgttttagttttttgaatagttgggattataggtacgcgttattatgtttggttaatttttgtatttttagtagagatggggtttcgttatgttggtcgggttggttttaaatttttgattttaggtgatttatttgtttcggttttttaaagtgttgggattataggtatgagttatcgcgtttagtttgtatttatgtttttttttttttttttttgagatggagtttcgtttttgttgtttaggttggagtgtaaaggcgcgattttagtttattgtaatttttatttttcgggtttaagcgatttttttgttttagttttttaagtagttgggattataggtttgcgttattatgttcggttaattttgtatttttagtatagacggggtgtttttatgttggttaggttggtttcgaattttcgattttaggtgattcgttcgttttggttttttaaagtgttgggattataggcgtgagttatcgtattcggtttatgttttttattattattatttaattttttaaggaaagtaatttaaattgtatattgtatttttttttttttttttgttttttgttgttagttttttgtattatttattgttaaataatatgaataggaaattgaaaggaaaattttaataattattggttgtagtattttttttgtgttttatttagtgtttgtttttttaggaatatgatatagggtttgatttaattatgaaaggcgtatatttttagagttttatattttttatagaatgaatgttgaattttgttttttttatttgaaattagattttaggtatggattttatgattattattataatggttttttagagtggatattgtattttgtagggaattattttttttttagttgttggtgtggacgtttttttttgatggtgtgggtttgggtttttgaagggtggtgttttgagtaaagatgttatagtagttatgtttatagttttgggtttggggttaggtggagattggttttaattttagagtttgttgttttaaaataaatttttttttttttttttttgagatggagtttcgttttgttgtttaggttggagtgtagtggcgcgattttcgtttattgtaagtttcgtttttcgggtttatattatttttttgttttagtatttcgtatagttgggattataggtattcgtttttacgttcggttaattttttgtatttttttagtagaggcggggttttattatgttagttaggatggttttaattttttgatttcgtgatttattcgttttagtttttaaagtgttgggataaaataaatttttagggtcgggagcggtggtttatatttgtaattttagtattttgagaggtcgaggcgggtagattataaggttagaagatcgagattatggtgaaatttcgtttttattaaaaatataaaaaattagttgggtgtagtggcgggcgtttgtagttttagttattcgggaggttgaggtaggagaatggtatgaattcggaaggcggagtttgtagtgagtcgagattgcgttagtgtattttagtttgggcgatagagtgagattttgttttataaataaataaataaataaataaataaataaatttttatatttatttgtattatttattattattattattaaatagggttttgttgtgttgtttaggttggagtgtagtggcgtgattatgattttttagtttcgattttttagttttaattggttttttttttttagttttttgagtagttgggattataggtgtgcgttgtatgtttggttaattttttttttttttttttttttgagatagagttttattttgttgtttaggttggagtgtcgtggtgtaatttcggtttattgtaattttcggtttttggattaaagtaatttttttgttttagttttttgaatagttgcgattataggtatgtgtcgttatatttggttaatttttgtatttttagtagggacggggttttattatgttggttaggttggttttaaatttttgatttcgtgatttatttgttttggttttttaaagtgttgggattataggtgggagttatcgcgtttggtatgtttggttaatttttaaaaaatttttgtagtagtcgggcgcggtggtttatgtttgtaattttagtattttgggaggttaaggaggtcgggagttcgagattagtttgattaatatggagaaattttgtttttattaaaattataaaattagttgggtatggtggtatatgtttgtaattttagttatttaggaggttgaggtaggagaattgtttgaatttaggaggcgggggttgtagtgagttgagatcgtgttacggtattttagtttgggtaaagagagtgaaatttcgttttaaaaaatttttgtttttgtttttgtagcgatagggttttgttttgttgttgtttaggttggtattgaatttttagttttaagcgatttttttgttttagttttttaaagcgttgggagtataggcgtgagttattgtgtttggtttttatttgttttggttgtttttttttgttttaggtaattatatatttttttaggtaattaagaaaagattgcgtatgatgagttttttttttggtatttttgggattgtttttaaaattagataagtgtttttattttgatattttattaagattttaatgaatagaatgtcgtttgtttttagtttgttggtttttttgcgaaggtttagggtttttttgtttgaaaagttatttttttgtcgaggtttttgatttttttttattacggtagttatgtcgagggtttatagagttattttttttttatttttttttcggttttttaagacgtatttgtattttcggagatgtttttttgtttttttgggttattttttttggtcgttatttattttgttgatttattatttgtgtaatagttttttttggaatttttaggtttttgttatttattttttgtagttttcgttttgttttttttgttttagtttttttttttattatttttttatttgttggtttttatttttgtttatggtatatttttgtgttatattttgatggttggataaaggttgagtgaaacgtatttatttttttggtgattggggtgtttattaattagaagggatttaaggttggcgtagttttttttcgtattttggggtatcgttttgtggtttttttttgttggagtttgtagttttttgtttttttttttttaaattttttgagatggagtttcgttttgtcgtttaggttggagtgtagtggtgagattttagtttattgtaattttcgtttttcgggtttaattaatttttttgttttagttttttaagtagttgggattataggcgttcgttattatgtttggttaattttggtatttttagtagagacggggtttttttatattggtcgggttggtttcgaatttttgattttaggtgataggttcgcgtcggttttttaaagtgttgagattacgggtatgagttattaggttcggtcgttgagattatttttataagttattaggtttggttgtagttggtagtttttgattattggtttcgttttacgtgatttgtgattttttttttggttttttggttttgttttgtttatttgtttattttttttatgtatgcggtttgtttatagggtatgtaatggggtttaattaggaaatggaaatcgtttgagtatttatttatttatttatttatttatttatttatttattttttttaagataaggttttattttgttacgtaagttgaagtgtagtggtgtgattatagtttatggtagttttgaatttttgagtttaagcgattttttttttttagttttttaagtagttcggattataggtgtatattatatgtttgtttaatttttttttttatttttgtagagatagggttttgttttgttgtttaggttggttttgaatttttaattttaagtaatttttttgttttagttttttaaagtattggagttataggtatgtgttattacgttttgttaatttttgtattttttgtgtgtgtgtaaagataaggttttattatgttgtttaggttggttttgtatttttgggtttatgtgatttttttgtttgggttttttaaagtgttgggattataggcgggagttatagtgtttggtttatttgagtatttagaatagaaggatttaaaggcggggaattagttatatagatgatgggagaggtgaaggttagatagggaatagagaggtaattagtaggaaattaaagtggtgtgggtttatatagttttttaaaggtatggatgtaatgatttatttagaatgagaaaataaataatagtaaattataaattataagtagttgttaaatattataaatattattatatgtagaagagtattagttaattgttagttatatttttaaagttttattttttttatatttttggtattatttttttaatatgatgattttgtaatatcgttttttatttcgagaatagaaaattgattaggttggatatagtggttcgtgtttgtaattttagtattttgggaggttaaggtaggtggattatttgaggttaggagtttaagatcggttcgggtagcgtggcgaaatttcgtttttattaaaaatataaaaattagtagggtatggtggtatatatttgtagttttagttatttaggaggttgaggtgggaggattgtttgagtttaggaggtcgaggttgtagtgagtcgtgattatgttattgtattttagtttgggtgagagagtgagattatgttttaaaaaaaaaaaaaaaataataaaaaaaaatataggttgggcgtggtggtttacgtttgtaattttagtattgtgggaggttgagatgggcggattatttgaggttaggagtttgaaattagtttggttaatatggtgaaattttatttttattaaaaatataaaaaattagttaggtgtgatgacgtacgtttgtaattttagttatttgggaggttgaggtaggagaatggtttgaatttaggaggtagaggttgtagtgggttaagatcgtgttattgtattttagtttgggtaatagagtgagattttattttaaaaataaataaataaataaagcgaatgaatttttttagttgattaaattttgtttttatttttggtagttgggatgtatataaaagtggcggttaatatggagttggtggtgttgttataattgttttgtttaagatatataggaattttggtaaattttgtttttttttttttttttaaatgtgatttttattaagaaagaagtaggaaaatgggggagatttttaattgtatatgaggtatttgtgtatgtatttttgattagagagatttttttgttttgattttatattgaaggaattgaattttttgtttataattttatttttggtgatgggagtaattttttatagatttgtttttggattcgtgtattttaaattttgtttttttttattgcgtacgttttttcggcgttaggtatcgtaggatatgttcgtgttttgtgatttttgattttgcgcggtaggtggaattggaacggtgagtggagcgagtattgttggaattcgtttttatatcgggatagcgagtagtaattgaattatatatggaaataaatgggaattatataaatataattcgattaaagttaaattaaatatttttttagtttaatttttttttagtaggagtttttacgtggtagtaagttttcgtttttattttatataagagaaaatgtgacgggtaggaatttaagattggaaatgaacggggacgttaattgattgtagggaaaatattttttattttgtaaattttataaaaaatgtttgattttgtggatatgtggttagggttttttttagtgttttgagagggaattatgtaggtagagggagggtttttagtattgtgggggtgatttggagattggtagtagggtgttattattatttttaggtggggatgagagggaggaagttttgtgattagagtttaggggttagagttatttgttgggagtttaaataaaggtgggattttggtaggagttggaattatatagaggattattttttttgttggagaagttgtttgaggtagaggaggtggagagttttcgcgtttttttttgtttttattttttaggttttttttaagtttttcgttggttgaatttagtttaaagttagtaggtttggggatttggatatttgagttagtagaggtcggcgttttttttatataaaggagggtataagaagtgggaggtacggagggggattaggttaggatttatataggatgtgtaaataggagtttttttttttttttattttaaatggtatttgtagtcggttttatttttttgttgttagataggaagaggaattttgttttcggtattagttgtttttatcgttttttattttacggaggttttttttttttttggtttttgtttgtaattattggcgacgttgatggattatattttttggggagtttggttatgaatatggttttttatttgttgtggattaaattgtgtttttttttttgaatttttgcgttgaagttttaatttttaatgtagttgtaattgaagatagggtttttagggaggtaattaaggttaaatgaagttatagggtaggattttaatttaataggattgatgtttttataagaagagggagagatattagagattttttttttttttttatttgtaaatagaggaaaaatgacggaggatatagtagggaggtgggtataagttaggaagaggggtttcgtcgggaattaattttgacggtattttgattcgggattttgggttttttaaattgagaaatatatgtttgttgtttaagttattttttttatagtaatttggatggtagtttgagtttattaaggtatcgtttgtattagttagggttttttagggagatagttaataggagatggatggatggatggatggttagatagatagataagcggatagagagagagagagataggtagatatagatagataggtagataaatggttagatagataagtagatagagagatagagatagatagatataaataggtaaatagataggtagataaatggatagatagatgatagatagttaggtaggtagatagatatagataggtagatagatagatagatagatgataggttgggtttagtgatttttatttgtaataattagtatattggtaggttgaggtcggtggattatttgaggttaggagtttgagattagtttggttaatagggtgaaattttatttttattaaaaatagaaaaattagttgggcgtggtggtgtatgtttgtaattttagttattcgggaggttgaggtacgagaattatttgaatttgggaggtggaggttgtagtgagttgagattacgttattgtattttagtttaggcgataaagtgagattttattttaaaaagaaaaaaaagatagatagatgaatggatagatagttagatagatgatagatggatgataggtagatagataattgataaatagatataaatgatcgatggataggtagatatagatatattgattaggtagatgatagatggatagatagaagatagatggtggatgggtgggtagataggtagatagatagttagaaagatagatgatagatagataggaaggaatttattaggggaattggtttatattattgtggaggttaagatgtattatagaaggtcgttcgtaagttggaggtttaggaaagttagtatcgtggtttagtttaagtttgtaggttttaggattgggaagttgttgatgtaatttttagtttaaggttaaaggtttgagagtttggggaattgttggagaattgggagttttaagtttaagggtaggagaggaaggtattttatttttaggagaaagagggaatttattttttttttgtttttttgttgtttggtaatggaatggtgttatttatattgagggaggatttttattatttagtttattaatttatatgtttattttttttagaaatatttttatagatatatttagaagcgatgcgttattagttattttttaatttagttaaattgatatttgtcgttagttattatataggtttagaagaatcgtggttgtatggtgatggtttttatttcgtttaaagaagttgaagatgaattgttggtataagttatcgtttttttaggttttttttagtcgtttatttttttaaaaatgtatttattgagtatttgttgtatgttaggtgttgtgataagtattggggtatagtagtgagtaaataaggatttttgttttttggagtttatatgtagtagaaggaaatagaattaatgaatttattagttttagaaattattaaaataggattaagagttgtggtgagaattaagataaggtgattgtatagaaagtgattgatggttgttttggaatgagtggtgaggggttatagagatgatgatagttgagttgagattgggaagataggaaggagttagtagtgtaaggattaggttggaagtaagtttggtgtattttaggaatagtaaggaggttagaggggttgtagtagagtaggcgaggaggaggagggagacgtaggttaaagaggagtttggggttagatggaggattttttttttaaagtttagttattttttttttaaaggagaatgtgttatttttaaaagttatatatgttagtatagtgtttggtttattatatgtttttagtaggcggtgagtatggttgtttttgttattattatattataattattaggaataatggagttattaggttttgtatttatagtaatgtgagggagttagtaagtttttttggggaatttatttttttttattaagtttataagagtttgataattaggttaatgtagtgagagttatagttgtttagtgtattggattttttagttacgggttaggatatttttattttagtagaaatttttaaggggattggggagtgtgttgtggatgtttttgggttatttagattttttggggagttttttttatcgtagttgttgtagggagtttagttgtagtgatgaattgcggtttagttttgtttatgggaaaattttatatgggagatgggacggttttttgttggttttttcggttttaggttgtttttataagtgtagggatttttatttgggtgtgtgaatggggtttaggatgttttaagggtatgtggagatgggggttagttgttttttttgatgtttttgaattttttttttttgtttttttgtattttattgttttttggttttttttattttgggtgttttggaataatatgtaatttaatatataggttgattttattattttgttttgttttattttattttattttggaaataaaggttttgttatttagtttggagtgtagcggtgtaattgtaatttattgtagttttgaatttttgggtttaagtgattttttcgttttagttttttaaagtgttgggattataggtatgagttgttgtgtttggtttaggttggttttaaaagttttttattttttttgtattttgatgatatttattttttggagtaggtttttagttattggtttcggatattttgtagttattattggttagttgtggtatgtgaagttgaggtttaggagaagggtagttttgtttaaggttatacggtttagtgttaatatttagattttagtgtttttattttttttttggtcgtttttatttttagtgtatttttggaggtttaagggagttaaaggttaggttttggttagttaagaatttaaaaaagttgtttttgtgtttttttgttaatttattattttattatttttttcgataatgaatttagtttgaattttagataaataaggattaatttttagtataagtatattttataatagatttgggatatatttatgtttaaaaatgatttattgtttgttggttttagtagtttatgtttataattttagtgttttgggaggttatagttggagaattgtttgagtttaggagtttaaggttatagtgagttatgattatgttattgagttttagtttgggtgaagtagtaagatttttatttttttaaaaaattgttgattgtttatttgaaatttaggtttaattgagtattttgtattttatatgagaattttatataggtgagatttagagttttaatgtttattggtaagtttttgtagggaggttttgtgggtttttggttggtattgatgttttgtgatgagtagggttatttggtaaggtggacgtttgttgtttatgtaggtagagtaaggttttgggtaggtatgagttgattttattttttttagtttgggagttagatattgttggtagtttgtcgttaagagaggggttggttattaagagaggggcggtttttatgggttttttttggtttttggtttttttttagttttttttttattttaaatagaggttaacggtatcgtattagaattagtgtgttgttttttttggttggtattttgtagttgggtagattgttttttttttataggagttggtggtgtttttttcgttttatagggaggatggttgagatttttgattttgatatagggtgttgttttttttttgttttgagatagagttttggtttttttatttaggttggagtgtagtggtatgatgttggtttattgtagtttttattttttgggttttagtaatttttttgttttagttttttgagtagttgagattataggcgtgtattattattgagaataatgttttttatagtgtttatttttttgtaggagtaagtttttaaggtaaggaggttgttttttttatggatgaataaattgattttgatttatagttttacgtgttagttttgagggtggggaaaggttgttttgtgtttaggtagggggtgggggtaaggttaggagggtttggtgtttagtgtatttttttaggatataattttaggtagtagaggttaaggatagaggggaggagaagagggaggtggttattatttttttattttagttttttttggagataagtttgagtattttagttgtttattaagtttggagataagtttggaatttaaatttttgattttgatttagttttttatagtttttgtgagtaaattgagttttagaaaaagggagtgaagtttgtgtattttggacgtttttattttaggtttaaatcgtttttattttaggtttaaatcgtttttattttagtttaaatcgtttttattttaggtttaaagcgtttttattttagtttaaagcgtttttattttaggtttaaagtgtttttattttaggtttaaagcgtttttattttaggtttaaatcgtttttattttagtttaaatcgtttttattttagtttaaattatttttaatataggtttaaattatttttaatttaggtttaaagtatttttattttaggtttaaagtatttttattttaggtttaaagtgttcgtaatttaggtttaaagcgtttttattttagtttaaatcgttttattttaggtttaaatcgtttttattttaggtttaaattatttttattttaggtttaaatcgtttttattttaggtttaaagtgggaaggagttatagggaaataaacgggggaggtacggatgattaggatgagggtttttatgatttatttttttttaggggttattttaagagttttttaaatttttattattttttaatagagatggggttttgttgtgttgtttaggttgatttttaatttttagttttaagttatttttttattttagttttttaaattgttgaggttataggtgtgagttattgtatttggttttttttaggagttttaagaaaaaaaatgggaatagatttgtgtgtgtgtgtgtgtgtgtgtgtgtgtgtgtgtgtgtgtgtgttttgagaaagagtttcgttttgttatttaggttggagtgtaatggtacgatttcggtttattgtaattttcgtttttcgggtttaagtgttttttttgttttagttttttgagtagttgggattataaatatgtaggttgattttgtatttttattagagacggggttttattatgttggttaggttgatttcgaatttcggattttagatgatttgtttgttttggttttttaaagtgttgggattataggtttgagttatcgtgttcggttaggaatagatttttttttgtagatgatttttgttattattgaaaatggatgtttatgtataattgaattgttataacgttttattttaaaaagtttttttttgagaaaatgtgatttttgatagaggagagattgtttaggttttatttattgttagtataaaggtagagtaggggtgtggcggtgttatttttttttgagatagttttatttttgttttgtttaggggtttagaagtttggtttattcgagtttatagaggggtttggagtggttgttttatattataggtggggtttgtaaggatttgaaatgatttttgagaaggcgggtgtggtgggtgtattttaattattaaagtaataataatgatatattaaatagtgtttgtttagattttgagtgtttgtttaaatatttttattttgtgatttgttagattttagtataataatttaggtaaaagaaaaaatagttgggcgtggtggtttgtgtttgtaattttagcgtgaggttaaggtaggaggattgtttgagattaggagtttgagattagtttgggttatttgagattttatttttgaaaataaataaattaataaaagatttttatgttttatgttttttttatatttaggttttttaaattatatgtattggggaaagtttattaagagaagtttttggtcgggcgtggtggtttacgtttgtaattttagtattttgggaggttaaggtgggaggattataaggttaggagttcgagattagtttggttaatatggtgaaattttatttttattaaaaatataaaaattagtcgggcgtggtagtgtatgtttgtaattttagttacgtaggaggttgaggtaggagaattatttgaatttgggaggtagaggttgtagtgagttaagttggtgttattgtattttagtttgggcgatagaaaaagattttatttttaaataaataaataaagggagagaagtttttgggtttttagatatatgggttagtgtttatttttgtaaagttgttgtgtttaaagaggggttgtatttggtggaattggggtaaaagagtagggagggtattgggtagttgatttggtttttattattggaaaggggttgtgttgttggtgttttgagttggttttataaggaagatattgtatagggcgttttaagtttgttttttttgtttaggtttatttttttttttttaggattagggagtttcgttcgttttttgttttcggtatttgttttttggtttgtgagtattgtatttttttttgtttggaacgtcggtttatggtgggttttcggatttttgttttttgttgttttttgttatatttcgttaaagtgtgttttatttatttattgttattattttttgaaatagagttttgttttgtcgtttaggttggagtgtaatggtgtgatttcggtttattgtaattttcgttttttgggtttaagcgatttttttgttttggtttttcgagtagttgggattataggcgaatgttattacgttcggttaatttttgtatttttagtagagatggggtttttttatgttggttaggttggtttcgaattgatttcgggtgattggtttacgttagttttttaaattgttgggattataggcgtgagttattatgtttggttaattattataatattgatattataataatattatagttagataacggtgattaacgtttgtaattcgaatattttgggaggttgaggtaggtagattatttgaggttagttcgagattagtttggttaacgtggtgaaattttgtttttatcgaatatataaaaattagtcggagcgtgatggtaggtgtttgtaattttagttatttgggaggcggaggttgcggtgaattgagatcgtgttattgtagtttaatttgggtgatagagtaagattttattttaaaagtagtaataataataataataataataatattatttattgagttttaattttgtgttaggtattgtgttagtatttgcgttatgtgattttattgattcggaataatttatgagtaagtattatttttgtttttaaggaagttgagatttaggaaatggaagttattttttagggtttatagtaagggtttggcgaggtttgcgtttaaattttgattatttgattttaggtttttttgttttttttgttttttaaaaatttaaatatttttatttgggatgattttagatagttagattttaattgttttttttttttttgagtatgttttattttaaaattatataaagataatttattttttaattggagttacggaatcgttagatgttttggagatttttttagttatttttttgttggatttagatataggtttgaataattaggtttaaggagttgaattggagtcgttcgtggttagaggtttttttttgggaatagtagtggcggtagcggttgcgttgagtttggtaatttgtttaagagtaggggatgtttaggttgcgttcgttttttttttatgaacggtttgttttgcgttttttttgtgttaagggttgttaggtattagatgtttattttaggaaattagaaaaataaatagtgtaaataaaataaaaattttatttaagaaatttgagatagatgttgttttttttatcgtttttttatttttatgttgggtttggagagagtgggttagtatgttttttacggataagaggttttggggtatttaatttggatggaattttttttattttttttttgtttggtgttagggggtagaaggtaggggtggtgtttatttggtttagggaggaggatagggtagtttttgtcgtcggtattttttgtagagatgttttagttagaagtgattttatttttaggaacgtgtgttttgttttttgttgggcggtttttttttattttttattgtttttatagtggggtgtgttagatttatgggtagagttttggtttatttttagtttcggatagtagaatgttttagtagtgtattgatggtgtgtgcgtggggatgtgtggaataggggatagtgatttcgtgtgcgttatatgtagtgcggtttttagtcgggtgtgtgaagggggtgtttatggttatcgtggaagtgagtttagttggggttggagggtttaggtttattgtatgttatttagtagttttgggagtggggtttattttttttttcgtttttttttttttttggttttgggtagtttatcggagttgtattttgggttattttttttggttttaaggaggttgttatttttgggaggtagatgttggtttttttatttttgttttttggagatttgcgtcgaggtttgtttttttgtttggagggattggttaggaatttttgggtttttttggtggggtttttgttgtttagtagtgagtagagtgagtgggtattaagaggaggatgttgggtgaggttacggatatggttggggtaggttgggggtgttggaggtgaatttcgtagttgtgcgattttgggtagtttgtttagttttgggtttcgtttttttttttatgaaatggggcgggagtatttgtttgttggggttgtgggttgggtgaatcggagttaaggtatagtttatagtttgtcgttagattttcgtaagtagaagtgggtgtttttgtttagcgtttttcggttttttttttaaggtttagttttgtttttattttttttatgaagtttttttggttattttaggagttacgatttatattttttttggagttttgtgttatacgtattttttacggtgttgttttttttggaggatgggtttaattaaaattggggtttatttgggggttttttttagtattagagaagtttaggtttagtagagatgggtattttgttaatattagtttcgcgaaggatatattgtgtttattttgttgttagttgttgagtttggtgttttgtagttatggaatatgtgtataggtttgggttgttggatacgaaggttagatgggtagtttattttgttttcgttttgagtttttagaaataagttggttgtatttatttttatttggttatagtttaggagtggggttgtggaatggatggaaggaaggatgagtgggtgggtgggggggtgggtgggtgggtggatggatggatggatgatgggtggatgggttgatggatgggtggattaggtggataggtgaatggattggtgggtgggtgggtgggtgaagggttgaataggtgggttgggtggatgggtggatggatgtgtggaggggtggtggggtggatggggtttatgggtgaatggatggatggatgggtgaatggagtaaatgagtgggtggatggatggatggatgttgtaagagtttttttggagggttttagggaggaattggtatttttgattagtagttagtatggtgattagatatagggaggtgtttgggtttgtttgattttttattttattgttggtgggattgggttggttatgtgtttttgaagttttttgaagggtggttgtatggtattgtttaggggatatttttagagtgtcgtgttttatagtaatagggtggtcgtttgtgtttttagggtcgttttttttggtagtttttcgggtttgtttggtttagtattttagtaaattttttcgagttaggatttgtttgttatgagtttttttaataagtagttttaggttaaggtttgtgtgtgggtagagggagcgtatgtcgcgggaggttgtattaatttgaggttttgtttttgtttttttttggggtaaaaggtaaaaatagtttgttttattttatttttaaatttagttcggttgtatttagttttgggagtgaagggggttgggttaggattgttcgtgagttgtagattttggtgtagggaaattttgatttataagacgggtggatatggaggaaggaggagatttcgtttagtagagatacgtttgggtgtagtttagtttggagtttgatggacgtgggtttatttgtgtgtaatttttatttattgtgtggttatagggaagtgatattttgtggagatttagattttttatttgtaaaataggggtagtagggtttgggggaggatgtgtgtgaaggtttggtttagggtttttttagtagttagatagtagtggttgttatttttttagcgtttagggttatttgggggagtagggtttttgtttttagatgggtttcgtttttggttttggaatttatagtaggagtaaaggcgaggatatttttggtgttaattatttattcggagggagagcgttagtggttttgtgtgatttttgttttttgtttttgtttttaggaggtacgcggatttttagtggtcggtttcggaggtttggtgattttagtggtttaggtaggtggttcgtttcgttttggttttatttagtttatgggtgtgtttgtgttggggtttttttattttggtttgggatttgtttttttatttggtttttttggatgagtggggttatttgtttattttttagggagacgtagtttttgacggttttggatttaggtggtttttaggtttgtcgacgttgttttgttggagatgatttttgtgggggtaggggtagttatttttaggtttagggagtaagttcgtgtgtgcgggatagaggagagaataggagatagatagggttggatgatttggtttgagatgttgaggggatagatgtgttatggataggtggttttggtcgtgagtttttcggtgttggtttagtatttgtgggttttttgtaattttgtaggatggaagatgttttaggatagagtagatacgttcggtgttatttaggaggaaataagtgggtttttggtagtggttattgtgttattttttgtgttttttttatgtgtttggaaattttttatattaattagtagggaagggaaatagatgtatttattagagttttggggttggtcgtttaggatacgagttatagtttataggtttgaagggattttattaatattgggtgtagtttgggtaagggagtgggatagagaggttagggttttgtttttagtttttgttttttagggttgagtttgcgcgttattttttttttattgggtgtttttgattttttttgtttgattttagtgtggttatgttagtgtttttgtttttgggagtttacgttgtttttggttgttatttttagcggttaggttgggataggtgtttatttagtggtttttttatttggagaggatgatgggttatagtaatgaatggatttattttttttaggagacgaggagttttgagaagagtagagatggcgtggttatttgtgtatatgtgttgggggttaattgggtgttagatttttggttgttattatggtggtagataggtagggattgtgtttttatgaattagttattttagaggagataaagttattaaaggatacggattcggagttaaatttatataaatagagcgtttgtggattagggttgtttttagaataaggtgagatagtcgttttgttaggataaggcgtttacgggggtaagggtatgtgtttatttggagtcgttatttttatgttttagattagtttcgtttaatagaattttttgtgatggtgggtttgttttatatatttgtatttcgttattttgtatggtagtcgtttagtcgtttgggtttattgtatatttaaagtataaatgtttacgtttattttatttatttatttatttgtatagaattatttatttattttaaatggatttttatttatatttacgtgtggttagtggttatgaaattgaatagttttagattatattggtatttgagattttagaattttagatttaaagtttgtttttgattttgagtttgtttttgtggggatagtatagacgttttttaagtttgttttttagaggtggatgtagtgttcgtggattgtgtattattaggtttggatagtggagagggtggttttttatagggagtgggagtggaggggatgtcgtgtttatattgagtgtatgtgaggttttttgtagtataggatgggattgtatgtgggaagaggggggtgatgttttggttggaggtttttgggtagttgtatgatttagcgttgtggttaagaggggtttcgtttatcgtagttatgttgggtattaattattggatagtttagtcgttgttgtgtttttggggagttttttttcggtttcgtatttgatttgtttttttattttttttttttttattggttagtttttggtggaatgggtggggagggttttttagtttttgtgggggttgtattttgggaatttggtattttgggttgtatggatatagtttttttcggcggttgtttttttttgtttagattggttggttttgtgttgttagtatttggtagttacgattatagtttagtttggaagtttaaggtataatttgttgaattttaaagttgtaagttggtgatttgggtttgcgtgggattgtttgttgatatacggggttttttttttgtgggtttttgtgggttttggttcgagatattttttttttatttttttggtttttttttttttttttgttttttttttgttaagattttggtttaggtaggagtttatttttagacgttttagtattttcggtttttttatttgatattttttagacgattgtttgttattttatttttttagtttagtttttttgtagatttatatttggttaattttttatgtttgggatttttgttttttttagaaggacgaaggtttttttcgaggttgtgtttgggattgggttagggatgatatttttggtaaaagtttaaatgatattatgattaacgttttggttagtttatatattttttttttttttaaaaaaaaaatggaatttttagagttataaaataaaaatgtaaagaataaggtaataaaatatttgtgtatttattatttcgtttaagaagtgagatattgtaggtgtagtcgtagttttgggtgattttttttattttagttttatttttgttgcggtgttcgtttttttggattgggatttggtttcgggtaggtatatttgtgttgggtagtggtgtgtttgagaagtttaggtttttttttttttttttttgagatagagtttcgttttatcgtttaggttggagtgtagtggtattatttcggtttattgtaatttttgttttttgggtttaagcgatttttttgttttagtttttttagtagttaggattataggtattcgttattatgtttggttaattttttttgtatttttagtagatatagggttttattatgttggttaggttggttttatatttttgattttaggtgatttatttgttttggttttttaaagtgttgggattataggtgtgagttatcgtattcggtttggtttttttttgtatacggttattagtatcgtgtgattgagtagtttaggtttgtttttttttgaatgtcgttattagtattatatttttggtgttttattggagttagtggttgttttgtttgtgtttataacgtgacggcgtggagatttattcgtgtagatttacgaagttttggtttatttattttggtagttagcgagtgtttttttgtgtggggaggtagagtttgttcgtttcgtggtttattggtgatatcgtcgaaggttttttttgttattagtgttgtcgggaacgtgtgtttttttaggtggatttggttgggttgtggagatgcgttttttagtttttttagatgttattattacgttttttcgagtggttttttggtaggtttttttatgttcgtttattttttgtgttttaggtagtcgtttttttgattgagcgtttagcggatttttgttttgttttttacggtgtacggagtattttattttagtggtgtttgagtttttttttttttggtttttagatttcggttgggatttttggagttaatttttttgtttgatatttcgtgtcgttaggttttgtttttttattttttaatatttttggggtgtgtggttttttttttagtgtttttattattttttttgttttaggttgaatcgtgttttttataaatttatgtttattaaaaattttagaatgtgatttgggagttggagatggggtttttgtagatgtaagtagttaaggattttgagatgaggttattttggattagggtgggttttaaatttaataattggtgtttttaaaagaagtagagaggttatagatatatcggggagagttacgtgaaggtaggagtagatgatggagtgacgtagttttaggttagggagcgtttgggaagaggtaaggaaggattttttttttattttattttagagtttttttagggagtgtggttttgttgatattttgattttggatttttggtttttagtatgggagagaattcgtttttatttttttaagttttatagttgtggtttattatggtagttataggatattgatgtattttttatttggtcgttgtggatggacgatttcgttcgtaggaagttttttttaagtattgtaggtgtttttgtttttataggggacgtttgtataagtaggtgtgaaaaaagggttttgtgggggtaaggtttgggttggtgttcgttgtttttttttattttatgttagtttttatgtttttttcggtaggagtgtttggttttatttggtgaattagagttaaatttttttgataattggttgttatttatttaattgttattatttttaggagatagaaaatgttagaagggtggggtttgtgtagtgttttttcgttatttttttagggtatcgtgttacgttgttttaatgtatagagtagttgtttaaagtgtgtcggacgaataggtgttttatgtttagttatgtagataaaagtgtgttacgtggagggagttggtcgtggaagagattattagtattttggttgttcgaggattttgtttttgggtttttgtaggtatttttagtttattatttttttttttatttatagttatttattttttttttatttttttgatattagttttgttatttatttaggtttgtaagtaggaaattttagagttgattttgatttttgtttttttagtatttttaggttttaataggttgttaagattttattaattcgttttttgtatattgatttttggataggttgtttcggttacggttatgttttggttgggtttttattatttttttttggattagtaggtgttattttttttatttttgttttgttgtggtttttttttttttacggttaatatttagaggacgattattatttttttttttgtgtgttggggatcgggtgataggatttttttattcgattatttttattagatttgggtcgggtttttttatttatagagtttttagttttcgtttttaaagtttcgagggtggattcgtgttgtcgtttagtttggttttgatatcgttttttagtttggagttttttgtttttgcgtttttggttttgagtgttcgggttttttttggatgggttgttatttgttttttggaaagtagggtttttatgtttttggattttttagttgatttagtgattttgggttattttgttatattttttttattagtttggttttggttatttttgtgttttttatagtttcggattagagttacggcgggatgtttttttggtgcgtggtaggtagttaggaaatattgttggattgattttgataggagatgtttgggagaattgtttaaaaaattagtttaaaatgtaaatattggtttttttttgcgttggttaaagagtagtattttttcgtttgtttttcgggtaagaaattgatggcgaatgtaatgtttttagggaggagaagaaggtgataaaaagggtttgtataacggggtatacgttaggtatttgtgattatttaagtttaaattataatataaatgcgaaattttttgttttggtagtttttttatattgtaagcgtttattgttatatgtggttgttatattgattacggtagatatagaatattgatattattgcggagagttttatgggggggcgttggtttagattatttttacgttggatttataaatttattgtttatttagtgaacggttattgggtatttattgagtaagtaggatgaaagatattcgttttcgggggagtttttcgttggttgtagagaagtttaaatttaggggatttggggtaaattttgtaagggtttttggtttttgtatttttagatttttttcgttttgtaggggtagtcgggggttttttttaggaatggagcgttagttttagtttttgttaggttatagtttagatggttggttgagtacgagtatgtgagagtggaattgggtttaatcgggttgttttttttcgttgttttggtttttttttacgttgatttggaaggatttttaaagtaataggtttgtttaggcggtttgtattagtaaattttgtagcggttttaagggtagagatagttggattgtatttatttaggaatagttaaagtttgaggtataataaaaagtggagaaagattttagagaggaatgtagttggttttagtttgggaattcgttttgtttgggaggttgtaggcgggttaggttggggttagtttggagggttttggttggttttgttggtaggtatagtagtagggttagtaggagggagtttaggacggagtttttttatttttaatttagggaagtaaattttagtggttgagtttgaggatgagtaggaaatgaatggaaaagtttttttttttttttttttttttttaggtagggtttttttttgttttttaggttggagtgtagtggtataattatagtttattgtagttttaatttgttaggtttaagggatttttttgttttagttttttaagtagttgggattatagttgtgcgttattatgattggttaatttttaaaagaaatgtttttaggttaggtatggtgatttatgtttgtaattttagtatttttggagtcgaggtgggaggattatttgagtttaggtgttttagattagtttgggtaatatgacgagatttcgttttgattaaaaatataaaaagttagttgggcgtggtggtatagttttgtagttttagttattcgggaagttgaggttgtagtgagttgtgattacgttattgttttttagtttgggtaaagggagtaaggttttgttttaaaaaaaaaaattttttttttttttgaggtggagttttgttttgttgtttaggttggagtgtagtggtatgattttggtttattgtaatttttgttttttaggtttaagtgatttttttgttttagttttttaagtagttgggattataggtatgagttattgtgtttggattttttttttttttttttttttttgtagagatgggatttttttatgttgtttaggttggttttgaatttttggttttaagtgatttttttattttggttttttaaagtgttggaattataggtgtgagttattatatttagtaggaaaagttattttttaaagcgagaggttgtgcgttttttatagtttggcgtttattagtatggaggatttattggaacgtgtgttaggtgaggggatatggaagatggtagtaaattcgagtttagagtattagaaagtatgtttttagttaaagatgcgttttttttattttcgcgtagtatttttttttagtgtgtatttttggagtaaggtggggtcgattttacgaagattttttttcgaaggtttttgttgtttatattagtgttatttggatcgtttgtttttttttttggatggttggattagttttagggttttttggtttggtgtggggagtatagtttattttggggaatgtttggtatgtgttttttttttattgggtattaggggatgaagttgtgtttcgtggaaggggatagaggcgttggtgtttaggatggtgtatttggggcggttgaattggatttggtttttattgggtttttgtggagtttagattgttgtgagaaggggtggggaaaggtaggtgattcgtattttttatttttgttttatatgggaataggggtttattttgtatatatatttagtttggagtatgaatttttatgaagaggaaaatttttattaggttttgatgttaggattgttcgtgagggtcgggtcgtgttttggggtaaggataggagtggagggggtaattagggaaggttttttaatggaggaggtatttgatagtattttgaaaaagaagtagtttttaggttaagttagagattgaagaatgattatttaattttttttttttttttttgagatggaatttcgcgttgtcgtttaggttggagtgtagtggcgtgatttaggtttattgtaatttttattttttaggtttaagtaatttttttgttttagttttttgaatagttgggattataggtatgcgttattatgtttagttaatttttgtatttttagtagagacggggttttattatgttggttaggttggtttggaatttttgattttgtgatttatttgtttcggttttttaaagtgttgggattataggtatgagttattgtattcggttacgattatttaatttttttttataagatgttttttggttgacgtaaagtaggttgagtgagtgtgatattttttttttgtttgtgggtttcggtttttttagagttcggttagtgttattggagataaagtggttttcgtttttttttttcgttttgttaggtttagtttgtgtcgttgagttttattttgtaattaagaggagttgtgaattagtgatgttgatgtcgtagaaaagtggttaggggtttatggggggtgaaggatagggatgtcgttttgagaattgtttggaaggggtttttgggtaatagtgtttattttagggtgtgggtaggttggggtggttgggagttgggtttataggttggtataattagagttttttaaagtcgtgggtttgagggttttgtttttttgggatagtaatttttggtttaatttgggaaaaggtgggttaaattaagttcggtttttttattgtaggattatttagtgcgtttagtatgtaaatgtgtttttgaatttaagataggattatagaaatttttttagtgtttttttggagggagggatcgcgggggatttatcgtaggggtttgggtttgtattggtttggtgaagtgtttttttagtgtttatattatgcgcggtgagaggttggttttcgttttttttattttttgttggttttattttattatttttgtattcgttttttagtcggtttatgattaatttttgtttttttagagttaatcggtgttgttaggttttttattttaagtgatttttcgtttgggttaaaatgtttggatttttaggtacggaggggagatggattttaggttaaattatgttgggtaaaattgagggttaaggttgtgtttagtaagtgttttagttttggtcgttaaatttatagtgtgtatagcgtgtaggaggtggttgggtgaatgaatttagttatagttcggttttttattcggggttgtttttaagtttttatcgttagttaggttgggttagagtttcgtggggtttttttgggtttttttgttttatagtaggagttcgtatggagagtttcgagtgaggttaatgggtttttttttttttttttttttttttttttaatttgagatagggttttattttttttatttagttagggtgtagtagtgtaattatagtttatagtagtttcgaatttttggttttaagtaattttttcgtcgtagttttttaaagtgttgagattataggtacgtgttattttgtttagttggggtttttgttttttatttttttttttgtttttaaatttaatataaagaaagatattatatttataattagaaaaattaataaggaatattattttaaaattggaaaagggattaaagaaataaattaagaaatttttgcgatttttgtttatcggagttagtggttgttagtggttggtttaatataatgttttaggaagaaatagaataatagaaagtaattttagtgagttgagttttggtttcgtttgtggcgttgtattagttttttgtagttgttgtaacgagtggttataagttggttgggttataataacgtttagttatttttttatagttttgtaggttatatattcgagattagggttattaggttgaaattagggtgtttattgggtatagttttttggaggttttagggtaggggtttttagtttcgtgtgttttattaggaattggtttgtatagtaggaggtgagtgattggtaagcgagcgaagttttatttgtatttatagttattttttattgttcgtattattgtttaagttttgttttttgtttgattagttatggtattggatttttataggagagtgaatcgtattgtgaacggtatatgtgagggatttaggttgcgtgttttttatgagaatttgatgtttgatgatttgttatcgttttttattattattagatgggatcgtttggttgtaggaaaataagtttagggttttaattgattttatattatggtgagttgtataattattttattatatattataataataatagaaataaagtgtataattaatataacgtgtttgtggtcgggtgtagtggtttatatttgtaattttagagtgaaattttgttttaaaaaataaaaaataaaggttaggtatagtggtttatgtttgtaattttagtattttgggaggttaaggttggcggattacgaggttaggagtttaagattagtttggttaatatggtgaaatttcgtttttattaaaaatataaaaattagtcggatacggtggtaggcgtttgtagttttagttttttgggaggttgaggtagaagaattgtttgaatttaggtggcggaggttgtagtgaattgagatagtgttattgtattttagtttgggtggtagagcgagattttgttttaataaaataaaataaaataaaataataaatataatatatttgaattattttaaaattatttttttattttttggtttgtggaaaaattgttttttttgaaatcgattttaggtgttaaaaaggttgggggttattgtttttatcgtttgtttttttgagtttttggtggttgtgggtgttttttggtttgtggttgtatggtttttatttttaatattagtatttatagattttttcgggttttatttttatttggttatttttgtttgtgttaaatttttttttgttttcgttttgtatgagtatcgagattgtttttagggattatttagattatttagggtgttttcgttatagtaagatttgtaattgaattatagatgtaaaaatttttgttttaaataaggttttatttgtaggtttagggattaggatatgttatttttggggttattatttagttttttttcgtgattatgatttttttttttttttttagttttttatttcggttgagatgttgtttttattttttttattgtttggttgtttgtggggttgttttttaggttttttgggaggaggtggttgtttgatgttttttagaaggttgggaatggttttttttattttttaggaagatgttttttttgttaaggagattgtatttggggttttattttaggtagagagcggacgggattgtggtttgaagtggtattttagggtttttggttttgttatttagtcgagggttgtgtatgggttttatttggttataggtaatttatttggttttgtggggtagggattgtaaatttagaggtttgcggggtgtgtcgaggtagaggggtgtaaatattgtaaatttgttgggggttttggggagtagtatagattgaaaagtgttttgtttgaagagtagaattgttttatattagttttgtgcggttaggtaggaaggttttcgtggtgcggttacgcgtttttttttttttaatagaagttgatagtttggagtttttagagagattgtttgagtttttagttttggtataaatatatattttttttaaataggtttgggttaatagaattagttttcgtgtttcgggtttgaatgaatttttgaggtgaagtttaaagatagagaggatgtttttgatttttattttagggatttatattgtaaatttttatttgttttgttgagtttttggttttagtatggattttgattatgtgttggtggggattttttaggtaagtaagtagtttttgaggatttcggatgaatagtggggaatagtattgattttttagtggggtttcgagttttcggagaggaagattcgtttttttttaggggacggttagagatttattgatttatgcgtgtgtggtaggaattttttaggaagttttcgtttcgttcgttttttttgtttgggcggggacggtaattgtttttgttattgtagattaatgggacggaggggggtgattttttagggttttttttgggtaggtgtttcggaatttttttttagtacgttggtttggggtacggtcgttttttttgtttagttacgttggggtatagggtgaagaagggttggggttagtttaggatagaggaaggcgaggtaggtacgtaggaattgggttttttaaatttttaagtttaaggaaatcgtagtatcgcgggatagggaaaatgaaagattttggaagtcgttaggaatttgattttgtgagttggtttttaagagtttaagttaagtatttttaagtggatattaaaaaggagtagtaagtttcggggcggcgggggttggaggaggtggagagaggaggttgtcggaagtcgtattcgggatttttgtagttatcgattagatcgggcggtcgggattttgggattttcgtaggtagattcggtggtttgtcggatttttcggggtttatttcgggtttttttttttgttttttatttttggattttttttttttgtttttttttttttttcgttttgaagagataatgttattttagtttggagtataaatatatgattagtatatggaaatgtggtaattcggatgtattcgtgattgtaatagattgaagaaattagattagataaagagtgtttttagaggaggaggaggaggaggaggaggttgagagagggagggcgacgggggtgagaaaggggaggtcgtttttgagcgggacgtcgggattttcgtcgttgttaaatatattcgtaggaatggagagggatcggattttaggtacgtagatagttttttttttatcggtcgttttttattgttttggattcggggttttatttatgtttgggggaataagtatgtaaagggcgtttttgtttattttttatagaaatattttttttttttttgacggttttaagttcgtgggatgaatttcgttttagaagttaagtttttttgagtttggtttttatttaaattcggttttttttttttttggttattttttttttattttttagtgtgttatttttgtatgttatggttattgttaatgttgaggttgttggcgtcgaaattttgggagggtgtgggggatttgtttttttggttcgggtttggggcggcggcgtttggatttggttggtggttggtttgtttattgtgtggtttgttttttgtttttagttaaagtttgtttttaaggttgtttcggttttttatttaaaatagtatttttgtgtttttttggtagttgattatagagggggaagttttcggcgtttagaggagtttggcgtgtgtgtgtacgtgtgtgtgtatgtgtgtgcgtgtgtttatttacgttggtagtttttttgtcgtaggtatagatttattagggcgtgaataggtaaatgaagagaaagggggtttttttgtttttagtttattttagttttttaggtttttttttttaggtttagtttttttggtttttttatttatatgcggtgtcgtggttgttattttacgtggttagcgtcgttatcggtaattagtagtgatgatagtttttgtcgtttatgtcgttttttgagtttagcgttgggagatatggggtggttgagttaagttttaggttttgggtattttgaagtgatttacgggttatggagcgggaggtcgttaagagtgttaatttttacgtgttttgggttttggtttgttggttgttattatgtgtgtgttggggggtttttgagaggtttgagagagggaggtttatttcggtggtttttttttaggacgtgtggttttttttattattgtttttagggttatatttttttttttttttttttttgagacggagtttggttttgttgtttaggttggagtgtagtggcgcgattttagtttattgtaagtttcgtttttttagtttatgttatttttttgttttagttttttaagtagttgggattataggcgttcgttatatttttttgtatttttagtagagatggggttttatcgtgttaattaggatggtttcgattttttgatttcgtgattcgttcgttttagttttttaaagtgttgggattataggcgtgagttacggcgttcggttttagggttatattttgattgttacgttgggattggtggagcgggtgtgtgttgtgtcgttgagtatatttagtcgggtatagtaggcggattttaggagggggttaggggagacggtagaaggtttgggtggtagtgaaattgtattttatttgtttgagttcgggggtttaggttcgttgggacgggtgggtgtggagtttagcgttttgtttttcgtttagtaggagtcgtagggtagggagcgttgagagggattttcgttaggtttgtatagtggagtcgttttcggagtgattattttattaggtagtttgggtagattatagtgggttttttgttttttgggttattagttttaggaggacgttattttattcgtttggttggtaggggtttcggggagtttcgggttcggtttttattttatagatgatttagtcgaggtttagatgggtgattagtaggggatttgagagttgagtagagaggcgtgggtttgggggtggtgttttttggggagttggaagtgatggtatttttttaggtttataaaatacgggttttttatgaattgaataaaatattttttgaaagtagttagtgttgtgttttagagattattttgatttttgttgtttttggttgaggatagtatagttagggatgaagcggggattttttttcgggttgtgttttgatgaaagatgttttttataaaattttattcggatgtgtttttatgtaagaaaacgtatatttttagaaatttagttgtaaattggttgtttttcgaatgaatacgatagtttcggagttgttttttttaatgaggttttcgttttgggtaaattttagcgttggtttttaattgttattgaattttcgtatagtttttggggaagtgattttttttttgtttttgttgggtggttttgagtaagttatttggtagttttgggtcgtagtttcgttatttgtaaggtgaggggtgggagcggtacggtttttaggtagcgtttttattttttgcgggtttttgcgcgtgttttgagttttgtgggcgtttttttttttattgaggggttttttttttttgtagggtatggtttacgtcgcgttgttaggttgtaagttattgcgagagttgttttgatttttaagtatgttttggtttgaggaggagttatggggaggacgttgtgtttgtgtgatagaggtttgttcggtagatgtcggttcgttgatttttagacgtggttgtgggtgttttatgttttattgggttggcgtgtgaggcgtgtttagtttaggttgttttatagttgtttaggaagggtttgtgggagggggtggttttattttggtgagtttacggtggtttgttagttttagggaaggtttaggagttttaagatttgtttttttgtttttttttcggtagtgtttggtttcggtttggtttgtgaacgggggtttgggtattttttcgttttttttgggggttgtggtttttttttgggaaggtgttggagggtttgttagtagggtcggtatgagttatggagtggtgattggtcgttgaggtatggaaggttattttttttagttaagggtcggagttttttttttgttttggaacggttttgtggtttttataaattaagtagttttattttgttttaagagtttgtattttagtagggagagagtttttaagaagggaattttttattggggagttttgttgggttgggaggttaggaataggttacgagggagggttgtaggtaggggaagtggtcgtttgtgtatggttatgaatgtaggttcggggttttggagggggtttggttacgttgtcgttggacgtttgtttttattagggtttatttgatgtagtacggtatagggtaaagtttagttttttttacggggtttttgggttattagtgggcggggaatcgaggttttttggagggcggtgttttagtttttattttttttttttgtttttcgttgtgttgttttcgatggtttttgttattttttgggagtttttatttttggacgttcggtgtttgttcggttttaatttttttagttttgtttttttattttcgaggtgagaggtttggtttgacgcgttttgtattcgttttttgtttagtttcgtgggaattttggtttttgtagtggttttttggggttgttattattaagtgttataaattgggtggtttaaaatattagatattttttttttcgtcgttttggaggttagaagttcgaaattacggtattagtaggtttggtttttttcggaggtttcgagggggagtttgtttttcgtttttggtagtttttggcggttttcgaaatttttggcgttttttggttcgtggttatattattcgatttttgttttcgttgttacggggtttttttttgtgttttaaatttttttttgtttgttttttatacggatagtttttttcggatttagggtttattgggtaatttaaaatggttttattttaagatttttaattttataacgtttgtaaagattttttttttaaataggttatgtttataggttttggggtggatgtaaattttaggggttattttttatttttttgttgttttcgtgtgtttggatgtatagtatggttttatgttttagattttttgttggatttttttggttttttggggtggtttttggttttttttattcgtttttgtgtttttggtgaggtgtcggggtcgggtttagtttttgtaggaattttggggatagtatggagtcggtaattttttattaggcgtttttttatttgtttagagtttatggttgtgaggggtttttttttgtggttttgatttgtaattttttagtggttagtgatgttgagtattttttcgtgtttattgtttatttgtatatatttttgtagaaatgtttgtttaagttttttatttgtgtttgatttggatgattgttgttgttgagtgttaggagatttgtagattaatatttagatattaattttatatttgatttatgatttgttgttattttatggattgttttttttttacgttgttagtgttttttgatatgtaatttttttttttttttttgagatggagtttgattttgttgtttaggttggagtgtagtggtatgattttggtttattgtaattttcgtttttttggttttagcgatttttttgttttagttttttgagtagttgggattataggtattcgttattatatttagttaatttttgtatttttagtagagacggggttttattgtgttgattaagttggtttcgaatttttgattttaagtaatttattcgtttcggttttttaaagtgtcggagttataggcgtgagttatcgtatttaggttgatatgtaaatattttaaatttttatgacgttttattttatttatttgtttttttgttgtttgtgtttttggcgttatatttaagaaattattgttaaatgtaacgttaggaagttttttttttgtgtttttttttaagagttttgtggttttagtttttgagtttaggtttttgatgtaagttgagttgatttttgtatgtggtgtaagggttggtttagttttatgttttgggtttttgatttattttttttttttttttacgtttagttggtttcgttgggtggcggggaggagtggggaagtttcgggttgggtttgtattcgattatttttttttaggttagttagggagttttagtttttgtttaggatttggttggacgtgttttttatcgggaaagtttgggtcgtttttttaggttgatggtagggttagttcggggcgttttgaggtttgttttgcggatatgttttttgttttaggtggtgtggttgttcggtttgcgtgtgagattagttgtttgtgttttaggttatggaggttgagtgtttttagtttgtttttttgttcggttttttttttggggaagtttttgtagtttattttttgttttcgtttttgttatttgtgtttttgtttgttttttgtttggaggtggttatttttggggttattttttatgatttggatataagtttttattttgaagttattatttaaatttttgtgttttaaattttttttatttattatatgggtttttattgtgattaatttagtagttgatgaagttttttttggggtttttttagtaacggggagttggttttttcggaggtttggtttttttttaagtggaagtggggcgtgagggtgttagtttttttttgttgtttggtgttttaggttggtttgttatttttggaagtatttgttatttttatatagtattttatatttattttttcgttttttatttttttttttaaggggttatttttgtttttttttttatttaattttatttatgtggttcgtttagtaatttttgatttttaatatgataaaataaattttttttgtcggttatttatttatttatttagtattgggtgttttttgtggatttggcgttggggtttcgtggaggataaagttagatatagtttttgtttttatgggattgtataagtgtaagattatattagtaaacgtgaaatataggaagtgataggtgtgataaaggggattagtggtaggatagaatttgcggttcgtaggattaggttaggagggttgtttcggggggatattttcgggttgagcgtagaaggatgaggggagtaaattaggtttaaatttagtaggtagaggcgatcgttgtaggtaatcggtaatgtgtttaaaggttttggggcgcggggggttgaggtcggtagtacggtaggaagtaagattggggttgaaagagattgattgttatgttgtgaaatatatatttggtttttatttttattttttggtatataatttttaaaatttttggaatttttaaagtgatgtttttttggatgtttatgattgatagattagttggtagttttaggatggtttttagggaagattaggtagaattataaggtttagtattatttcgtaatttttaggtaggggagaggggttgaaggttaagtagattattagcggttaatgattgaattaattatgttttcgtaatgaggttttcgtgaatatttagaaggatggggtttcgggagtttttggatggatgagtatgtggaggtttttggagggtggagcgtttggggagtatatggaagttttgcgttttttttttatattttgttttatatatttttttttttgtattttttgtaatattttttataataaattagtaaattttatgagttttaggaatatgtgtaaaagaaaaaaaaaagaataaattatagttgttgtagtaagttaattttattagtattggtttttatttgtcgattttatttttggtaatgttttttttttttgggtttttgggattttttcggttttattattttttttgtagtggtttcgttggttgttgtttttaggttagtttatttttattcggtttgtttttattaggggttgaggtttttttgtttattttagttttttggttcgttttttgttttgggtatttttttatttcgaacggttagagtttttgaagtcgttcgttgtgtgttttcgtttggttttatgtatttcgtacggtgttttttagggttttttattggtaagggtattggtatagattttggggttgttttggtttaagtttattttgatttggagtttgagggtttttgagggggttttgaaggttagggtaggtaaggttggtatgttttgggtagtgggggttgggtatgggaggggatcgtgggtggggagattttttttaattagcggtttacgtttggagattgatttgggttttaggttacgttttgaaattgggatagagagtggcgtagattttagttcggagattttttttgtttgtggacgtttttatatttttattcgtggagttatttttttttttttttttttaaatggggaaattttgatttgaatattgaataaataatatattttcgaaattagcgaagaggtattggttttgaaattttgttatgaaagtttgaaaatgttttttggatcgatttgttggaatagacgggtgtgatggggttgcggggttttaggtggtaggaggcgttttcgtgtttagggtatttcgatgtttagagttttttcgtgtttagtgtgtttttgtatttagggtatttttatgtttagggtgttttcgtgtttagtgtgtttttgtatttagggtatttttatgtttagggttttttcgtgtttagggtgtttttgtatttagagtatttttatgtttagggtgttttcgtatttagggtgttttcgtttttagggcgttttgtgtttagggtgttttcgtgtttagtgtgtttttgtatttagggcgtttttatgtttagggtgtttttatgtttaggtattgtttttttttatttttttaatttttttttattaataggtgttagttgtgaaatgtttgttgtgtgtgttttttggttgagtttattttgtgtttttaagtttttgttagatataggtaggttgttttagtttttttggtaaatgttttgttgttgttgtttgatacggggttttatttcgttatttaggttggagtgtagtggcgttatttcgttttattgtaattttcgttttttaggtttaagcgatttttttgttttagttttttaaatagttgggatgataggcgttcgttattatgtttggttaatttttgtatttttagtagagatggggttttattatgttggttaggttggtttcgattttttgattttaagtgatttatttagtttggttttttaaagtgttgggattataggtatgagttatcgtgtttggttcgtttggtgaatgtttattgaggtttattatgtgtagttttttttttaggtgtttggtttgtaatgaggagtaataaagatatagtcgttggtcgtttgttatttaatagttggaattgagaggtagtttataaatgagtaaatttataggtggttttagatgaggattgtgaagaagttaagaataggttgttgggggtgtatatttgtgtgtgtggcgaggggattaatggaagttttttttgagtggtgatattgagttgaagttgtaatgattagaaggatttagttaggttaaaatttaagggaagagtaatttggtaaaggaaatagtaggtgtgaaggttcgaggttggagtttggggaaggtgggagtggttggagtgtgtttttagagacgggttatggtgatattaatgcgataggtagggttaggtcgtgtcgggttttggaggttttggtgagggtttgattttatttttattatggtgggattttagtgttttgtggttgttgagaatggttaggggtaggtagggaggtttgttagggaggaggttgttgtaggttttgtagttggagagggaggattaggatttttttagagaggaagttggagagggaggatttttttgattgttggatggatttatttgtttggttgttttcgttagtatttagtagaggttattggatgttgataggtggtcggttttgtttagttttgtattgttttgtgttgttttggtggttgtcggttttaggaggagcgtttttggtgtttgagtttagtggttttggttgtggtttggtatatttggtcgtgggtgaggttaaggtggtttggattttgggaaggttgggtatttggtagttttaaggtaggagttggggtgttggaggaggaagtacgtttatttttcgtttttttttgtttcgtgggatgttgagtttttgggtagggatatggtgagttttggtgtgatgtatttaatatttgttggtgtttttatttttaagtaggaattttggtgtttggtgtttgaggattgttgtttatcgttttattattttttaggtttttttttagtttttgattcggggtaaggtttagatatttagaatatttttggttggtttttggagttggggtgaggtagaattttttttttatatttatagtattagttaaggtttcggggtttggatattatttttgggaggggtgagtaggataagtgaggtttttagatttggggtggtttcggattggttaggtaggtgggtgggggttgtagtttatgttttcgttttaggtaatatagtcgagttgtagttttcgttttatttttagttggggttttttgtgtttattttttgttttttttttttttttcggaatggggggtggatattttaagattagttttttagttattttttttgttttttgttttttttttttcgggatagatttttgtgatcgttgggtgtttttgatgttttgttttttttgcgttttgtgtcgtgggtgagagagggtttcggggggattttttttttttggagtatttgttgtttcgggtgtttttgggggcgggtttttattttatattgtggagttggtgtaggaaggaaggtgtcgggagttagttttaatttacgtgttggttgtggtttttaaggtgtggatggtaggaggtggtgagatagggatttattgattatgggattgatatttttttatgttgatgtgggttttgagttataattttattagtttttgagttttggcgttgtttttggcgatggcgtggatttagttaggttttcgggtagttttttttggatttttttttcgtttttttttgggtagtgtttttgtttatttggaaaggatgggtaggatttggagataatagggatttaaagaagtcgggagtgggggtatttgtgtagtttattttgtagaatagataatttggttaaagtttaaagtttgttgttaggagtttcgtttgttttttagagagtatatggtttgattattacggggattgggggagaggtataggtatgtttgttcggtagtagaagggaatttcgggtttgggtttttttattttgtggcgttgtttttttttagagttgtattgttttttttattgtttttgtttggttttagtgtttatgtggtttgtggtttttagtttgggtttggtttttcgtaatttattttgtttagttttatatagtttgtttttttagttgggaatcggagtttatttggagttttaggtagtagattcgatgtagtgatgtagggttgttagttatgttagtaggttttgttgtttatagagggatgggtattgttgttgataataattaaagaattacggttttaggttgggtatagtggtttatatttgtaattttagaattttgggaggtcgaggtaggagaattaattgaatttaggagttttagattaggttgggtaatatagtaaggttttgtttttataaaaaataaaaaataataataataataaaaattatagttttagaatgattgattttagtatgtttataaagttaagggtttttagtgttttgggtttatgttattgcgttagagggagagaggaagaggttggggtgatgggtattggggtttatgttttttttggaatgggtggttttggattgtgtttgtgtgatatgtttgtcgagcgggggcggtgtttattgaggattggatgttgaggtgtgggtggggggaggttatgaagtattgggtatttttcgtgtattagtgtttcgagattgtagagaggggattcgtttagtttgggtagggaggcgggtggtagcgaggaaggggagaggaattcgggtgtagaaagttttttttttagtaggtggcgtcgtaagttttcgagagtttagtttttgcggggtttgtatttttattgaatttgtgggtagaggttgtttgggtgtagttttcgttaattgtgattgtttattgcgggcgaggggaagtggagtgtagagaatgtatcggagggtagatgattagttttcgtataggtacgggggtgttttttttttcgtataggtacggggggttcgagtttttggggtttttgttttaattgggcggggaaagggagggttggaagttgagttagggggaaagggggtggttttttgttattttttttattttattttttttatttttggttgataggttttaattttttttatatttttttaattttttgtcgtaaaattttttaaatatagaaaagatgaaagagggttgagtgtggtggtttatgattgtaattttagtattttgggaggttgaggtaggaggattatttgagtttaggagtttaagattagttcgggtaatatagtgagattttatttttataaaggatataaaaaattagttaggtatggtggtgtaggtttggagttttagttattcggaaggttgaggtgagaggattgtttgaatttgggaggttgaggttgtagtgagttgggattgtgttaatgtattttagtttgggcgatagaataaaattttgttttaaaaataaaataaaataaaattataaaaaagaaattatgaaagattttaaagtaaatatttatgtatttattatttagattttatagtaattattttgttgtttgttttattataaatttttttggttattagtatttacgttggttttgatgtatttaaaataagttgtagaaattagtatataatattttgttaatattttagtttgtattttattaattagagttcggtatttgtttgtgattatttttgtttttttttgaagtaaaatgtatatattttgagatgtataggtgtgaaacgtttcgttttttgaattttaataaaggtatttacgtgtattttagtttgattagaatatagaatattattattattttagtaagttttttatgtttttttaggtgtattatagtttttattttttttagggtaattataattgtgttttttttttattacgaaataattttgttagtttgagtgttttttagagttatttatgttgttgtaggtgttagcgatttgttttgttttattgttgagtaacgtttattgtgtgaatattttgtgggtttttagttatttttttgttgaaagatttttggttgtttttatttggaggtttttatgagtaaatttgttacgttggttttttttgtataagtttttttgtgtatatgggcgtttatttattttgtagaaatatttagagtaggtatagggtaggtatatatttagttttataagaaattgttagatttttttttaaagtggtttttttattttatatttttattagtaatggatacgagttttagttgttttatattttggttaatatttggtgttgttattttgtgaaattttagttattttggtgggcgtgtagtggtattattttattatggttttaatttgttttggtttgatgattaatgcggttgagtatatttttatgattggttttttatatattttttttttgtgaaatgtttttttaaatttgttgtttattttaaaattgggttgtttgatttttttttttggatattgattttttgttagatacgtgttttataaatattttattttagtttgtggtttgtttgtttattttttttttttttttaagaataaggtttcgttgtattgtttaagtaggtttgaaatttttgggtttaagttgtttttttgtttttgtttttttaagagtcggttttataggtatgagttattatgttcggtttgtttatttttttagtggtattttttaataagtaaaagtgtgttattttaatttttatgaagtttaatttaataaatttttttttttgtggttttttttttgtgttttttgtaagaaatttttgtttattttgttaaattgtaaagatatttatgtttttttttagaaggtttagagttatatagtttttatgaattaatttttgtatatggtgtgaggtagagggttagggtttattttgttgtcgttttatgtgtttatttagttgttttaaattttatttttttttaaagtttttattttgtatttttttggtgatttatgaggtcgtataattttttaagatttttgttggttatttacgtatttttttttgtaaaattatttgtttacgttttatttttttttaaaattatgttgttttaagatcgagtgatttttgaagtttttattttataatgtttgaaagaatgaatattttgttttttagttataggtttttgttttttgttttgtagttgtatagtggggtaagatttgggttttgttttgttgttgttttgttgtttttttatttgattgtttttttatgggttttatttaaaaaaaaaattggtcgggtatagtggtttacgtttgtaattttagtattttgggaggtcgaggcgggtagattacgaggttaggagattaagattattttggttaatacggtgaaattttatttttattaaaaatataaaaaattagtcgggcgtggtggcgggcgtttgtagttttagataatcgggaggtcgaggtaggaaaatggtgtgaatttgggaggcggagtttgtagtgagtcgagattgtattattgtattttagtttaggtgatagagtaagattttgttttaaaaaaaaaaaaaaaaaaaaatgttgttttatatgttttttatatattttggatataagttttttattagatatatgtattataagtttttttttttatattgtttttttttttttggtttttttaatgatgttatttaatgagtaagagtattttgtttttataaagtttaatttattaattttttttagtttcgatttatgatttttgtgatttatggaggaaatttttgtttatattaaggttaaaagaagtttttttattttttagaaattttatagttgtatattttatgattttttttattttttaattttttaaatttttatattttttaatttattatagtcgttaggatgttgtatgatttattttaaattagtttttgtatttggtttgaggttagggttaatttttgtttttttatatttatatttagttttagtatcgtttgttgaaaagatatattttattttattgaattatttgatatttttgttaaaaattattgattgtatatgtggttttatattagtatatgtacgtatatatatgtaggttttgtgttgattgtatgtgtggttttatattagtatatgtacgtatatatatattggttttatgttgattgtatatgtggttttgtattagtatatatatattagttttatattgattgtatatgtggttttgtattagtatatgtatatatatatatgtaggttttatgttgattgtatatgtggttttatattagtatatgtatatttatatatgtaggttttgtgttgattgtatatgtggttttgtattagtatatgtatatatatatatataggtttcgtgttgattgtatatgtggttttgtattagtatatgtatatatatatatgtaggttttatgttgattgtatatgtggttttgtattagtatatgtatatatatatatataggtttcgtgttgattgtatatgtggttttgtattagtatatgtatatatatatatgtaggttttatgttgattgtatatgtggttttgtattagtatatgtatatatatatatgtaggttttatgttgattgtatatgtagttttatattagtatatgtatatatatatatgtaggttttatgttgattgtatatgtagttttatattagtatatgtatatatatatatgtaggttttatgttgattgtatatgtggttttgtattagtatatgtatatatatatatgtaggttttatgttgattgtatatgtggttttgtattagtatatgtatatatatatatgtaggttttatgttgattgtatatgtggttttgtattagtatatgtatatatatatatgtaggttttatgttgattgtatatgtggttttgtattagtatatgtatatatatatatgtaggttttatgttgattgtatatatatatgtggttttgtattagtatatgtatatatatatatgtaggtttcgtgttgattgtatatgtggttttgtattagtatatgtatatatatatatgtaggttttatgttgattgtatatgtggttttatattagtatatgtattgtatatatgtaggttttatgttgattgtatatgtggttttatattagtatatgtattgtatatatgtaggttttgtgttgagatattattgtgtttttttgatattttgtttatttttttgttgatgttatattttgattaatgtggttttatagtaagttttaatataaagttttttaaatatttaaaatattattttgaatattttaggttttttgagtttttttataaatttaagaagtagtttgttgatgtttataaaaatgtagtgtgaattttggttgagattgtgttgaatttgtagattaattaaggaagaattggtattttaataatattgagttttttgtatagatggtatattttcgttttaaaggtttttttgtattttttttatttttttattgaaaaaaaatttttatagaattatattgttttgtagtttttaagaaaaagattttgtatgttatttgttaaatttatttttaagaattttatttttggtattattttaagttgaaatagattttaaattttatttttaattatttgttgttagtatgtaaaaatataatagatttttgtatgtaaattttatattttatgattttttttaaagttatttattattttggtaatggttttgtaggttttttaggatttaaatatatagttttatttttttttgattttgatgttttgttttttttttttgttttattgtattggttagagttgttagtttagtattgaatagtagtgattagtggatatttttgtttgtgttaaatttataatgttaattttagatttgttatatatgatttttgttagattgaggaaatttttttttatttttaatttgttgaaattttttaatatgaatgggtatgattttagtaaatgttttttttgtatttatggaaatgattattgttttgttttttattcgtttaataggataaattataatgattgatttttgtttttcgttttttttttttttttttttaaagaaatagagttttatttttgtttaggttgtagtatagtggtgttatcgtagtttattgtagtttgaatttttggatttaagtaatttttttattttagttttttaagtagtagggattataggtatatgttattatgttaagttaatttttaatttttaaaattttttgtatagatggggttttattgtgttgtttaggttggtttgtaatttttgagtttaagtaatatttttatttttgttttttaaagtgttgagattataggtgtgagttattgtgtaggtttgattttttaatattgaattaattttgtatttttggaagaagtttaatttgtttatgagatattattttttttatatattgttaaatttgatttgtttagtttttaaggatttttgcgtgttgatttatgagggatattggtgtggtattttttttgtttgttagtttgtttcggtaatgtttttgttagttttattttggttttataaaattagtttggaagtgtttttttttttttgttttttgtgtttttataaggttgatgttgttttttttttaaatgtttgatagaatttattaagaaaatcgtttggatttagaattttttattaggaaaggtgattgtttgtttttaattataaatttaatttaatgtatagaaagagttatttaggtttttttatttttttttgttttatttttggtaagttgtattttgaaggaatttgttttttttaggtaagttgttgaatttatttatttaaagttgttcgtaatataagtatatttagggtttgtttttagatttcggtaataaagtaaatattgtaataaagtacgttatataaattttttggttttttagtatatataaaagttatgtttaggttaggtatggtggtttatgtttgtaattttagttttttgggaggttaaggtgggcggattatttgaggttaggagtttgagaatagtttggttaatatggtgaaattttatttttattagaaatataaaaattagttgggtgtggtggtatatgtttgtagttttagttgtttgggaggttgaggtgggagaattgttcgaatttgggaggtggaggttgcggtgagttgagattatattattgtattttagattgggtgatagggcgagattttattttaaaaaaaaaagaaaaaagttatgtttatattatattatagtttattaaagtgtataagattattatgtttttttgttaaaaaatgttaataattatttgagtttttagtaagttataattttttttttggtagaaggtttgttttaatgttgatggttgttgattaggtggtggttgttgaaagttgaaggtagttgtggtagtagtttttttgttttttttttttttttttttttttttgagatagagttttgttttattgtttaggttggagtgtagtggtacgattttagtttattgtaatttttgtttttcgggtttaagtaatttttttgttttagtttttcgagtagttgggattataggtgtttgttattacgtttggttaatttttgtatttttagtagagatagggttttattttgttggttaggttggttttaaatttttgattttaggtgatttatttgttttggttttttaaagtgttgggattataggcgtgagttattgtatttggtcggtagttttttaattgaagtttttgatatgggttgatttttttttttatgaaagatttttttgtggtacgtattatgtttgatagtattttatttataatagagttttttttaaaattagagttaatttttttaattttggttacggattgattaaataagttgatgtaatattttaaattttttgttgttattttaataatgtttatagtattttcgtttggagtagattttatttttaggaattattttgtttgtttatttataagaagtaattttttatttgtttaagtttgattatgggattgtagtaatttagttttatttttaggttttatttttaattttagttttttgttatttttattatatttgtagtgattttttttgttgaagttttaaatcgtttatttatgagggttggaattaattttttttaaatttttgttaatgttgatattttaatttttttttgtgaattataagtgtttttaatggtatttagaatggggaattttttttagaaggtttttaatttattttgtttagatttattagaggaattattaattatggtagatattgttttataaaatatattttttaaataataagatttgaaaattaaatttattttttttttatgggttgtagaatgggtgttatattagtaggtatgaaaataatatttatttttatatatattttcgttagagtttttgggttataaggtgtattgttaatgagtaataatattttgaaaggattttttttttttgagtagtaggttttaatgatttttttttttttttgatggagtttcgttgtgttatttagaatggaatgcggtggtatgatttcggtttattgtaatttttgtttttcgggtttaagtgatttttgtgttttagttttttgagtagttgggattataggtatatattattatgtttggttagtttttgtattttttgtagaaatagggttttattatgttggttaggttggtttcgaatttttgattttaggtgatttatttgttttagttttttaaagtattgggattataggtatgagttattgtatcgggttttatttgttttttttttgttgttgttttttaattgagatagagtttcgttttgttgtttagattggagtgtagtagcgttattttagtttatcgtagttttcgttttttaggtttaagtgatttttttgttttagttttttgagtagttgggattgtaggtgtgtattattatgtttggttaatttttgtatttttaatagagatgaggttttattattatgttggttaggttggttttgaatttttgaatttaggtgatttgtttgttttggttttttaaaatgttgggattatagttgtgagttatcgtgtttggtttttttttgtttttttgtttttttttaaattgagatagagtttttttttgttgtttaggttggagtatagtggtacgatttcggtttattgtaattttcgttttttgggtttaagcggtttttttgttttagttttttaagtagttggaattataggcgtgtgatattatgtttgaataatttttgtatttttagtagagatgcggttttattatgttggttaggttggtttcgaatttttgattttaagtgattttttcgttttagtttttaaaagtgttgggattataggcgtgagttgtcgtattaggttttaatgggtttttaatatttagtaaattatgttgtaaatagatgtgttgttaagtagggtttgttattttatttttgaagtatagatagaatagatttggtagaatttttaagggttttaggatttttggaacggttaatgagtattggttttaatttacggttaatagttgcgttagttttttatgagagttagtttgttttttgaagttttaaagataggtattgattttttttttttagttatgaaaattttagatgatatttttttttagtagaaggtgggatatttatgttgaaattttgttgtttagtgtagttatttttattagtgttttgagttagattttttgggtaatttgttgtcgtttttttattagtatttgttgttttattttgtatttttatattatagagatggtttttttttttaaattttatgatttgatttttgttagttttaaattttttttttttagtttttttattttttttagtttttatattattgaagagagttagggttttgttttggattaggtttttgtttaagggaatgttgtggttgatttgattttttatttagattatttaaattttttttatattagtattaaggttgttttgttttttttttttttatgtgtgtattggaatcgtatttttaattttttttaataatttttttttggtatttataatttggttagttatttggtataagagattttatttttgtttgttttggttttcgatacgttttttttatttagtttaattatttttagtttttgatttaaagtgagagacgggtgatttttttttttatttgaatatttagaggttattgtagggttattaattggtttaattttaatattgttgagttttagggaatagggatgtttgagtagagggagagagagcggggaatagttagttagtggagtagttagaatatataacgtttattgaataagtttattgttttatttggatgtggttcgttatgttttaaaaataattgtaataatggtattgaagattattgattattgggcgcggtggtttatgtttgtaattttagtattttgggaggtcgaggtaggtggattatttgaggttaggagtttgagattagtttggttaatatggtgaaatttcgtttttattaaaaatattaaaattagttaggcgtggtggcgggtgtttgtagttttagttattggggaagttggggtagaagagtcgtttgaatttgggaggtggaggttgtagtgagtcgagattatattattgtattttattgtattttagtttgggtaatagagcgagattttattttaaaaaaaaaaaaaaagggtcgggcgtagtggtttacgtttgtaattttagtattttgggaggtcgaggcgggtagattatgaggttaggggattgagattattttggttaatacgatgaaatttcgtttttattaaagatacgaaaaaaatagtcgggcgtggtggtgggtgtttgtagttttagttattcgggaggttgaggtaggagaatggcgtgaattcgggaggcggagtttgtagtgagtcgagatcgcgtcgttgtattttagatagagtaagattttgttttaaaaaaaaaaaaataaagaaagaaaaaagaaaaaagagattatagattattatagtagatataataataatgaaaaagtttgaattattttaagaattattaaatttttatatagagatatagtgttaatatgttgttggaaaaatggtgttagtagatttatttgatgtagggttgttacgaatttttaatttgtaaaaagtgtagtatttgtgaagtataatgaaatgaggtgtgtttgtgttttttgttattgtaatgtcggtaggattcgtaaggaaaatattttattttttttattgtgattttatgttcgttattttttttttattagtagtttggttaggaggttattaatttagatttttttaaagaattagtattggattttttttttttggtgtttatttttttgagtttttttgttatttttattatttttttttttgtatttgttttagcgtattagttagggtttagttaggaaataaaaattatatcggtaatttgaatagtaatttgtaatataaagtgtttttaattgtaagaggtagttaattattaaagggattataaaggggtgatattgtgatataagaaagatgtatttgggttgggttcggtgtagtggtttatgtttgtaattttagtattttgggaggttgaggtaggcggattttttgagtttaggagtttgagattagtttgggtaatatggtgaaattttatgtttattaaaaatataaaaaattattttggcgtggcggtgtgtgtttgcggttttagttatttgggaggttgaggtgagaggatagtttgagttcgggaaggtagacgttgtggtgagtcgagattgtattattgtattttagtttggatgatagagggagattttgttttaaaaattaatgtatttgtttgtttgtttgtttatttatttatttatttatttatttatttatttatttagtttttgttttttaattttgtttggtatgtagtttttaaaatttttgaaatttttaaagtgatgggtgtttttttgtttgttaaggaggcgattggtggttggaggtttttggatagtttggggataagggttggttgttaggggatttagttttgtgattagaaggttagaatttgtagttttttttatttattttttgcgaggtaagaggggatgaaggttgagttgattattaatggttaaagattttatgttatgtttatgtagtgaagtttttttgaaaatttaaaaggatgaggtttgtagagttttaggttgttgaatatttgtaggtgttgggagggtagtgtattttttcgtggaagttttatgtcgttttttttatattttttttatgtattttttttagttggttgtttatttgtattttttgaaatattatttgtaataagttagtaattttaagtaaattgattttttgggttttgtgagttatttaagtaaattattgaatttgagaagggagttgtgaagattttaaatttgtagttaagttagatagaagttatgggtaatttggtgttttattatttgcgattgatttttgaagttgagggtagttttgtgagatggaatttttaatttatgggatttgtattaattttggttggtgttagaattgaattgaattgtaggatatttagttggggattgttgagtattggagaattgtttgggggtcggcgggaggaaattatatatttggtgttagagttgaagtattgagtgttgtgaatgagagtggagagatagagtttgttttgttttatgtaagaggattttaaggagtatagaaagagtaaatatgagaagtagttattttagaagaaaatataggaggaaagtttcgtgatattggagttggtaatgtttttttggatgtgatatcgaaaatataataaaagaaataaatgataaattggattttattaaaatttaaaatttttgtgtattaaggaatattattaatggcgtgaaaaggaaatttatagaatggaagaaagtatttgaaaatcgtatattcgataaaggattagtatttagaatatataaagaatttttataattaagttataaaataaaaaaaaataatttagtgaatagatatttttttatagaagatatattaatggttaagaagtataggaagagatgcgtagtgttattaattattagggaaatgaaaattaaagttataataaaatatgattttatattttttaaggtggttgttagttaaaatatggataatagtaagtgttggtaaggatatggagaaattggagtttcgtgtattgttggtgggaatgtaaaatggtgtagttgttgtggaaaagatataataattgtttaaaaaattaaatttagaatgattataatatttagtgattttatttttagatgtatattttaaagaattgatagtagggatttgaataggtgtgttatatttttgtttgtagtagtattttttttataattaaaagatgtaggtaatttaggtgtttattagcggatgaatgaatagataaaatgtggtttatttgtatagtggaatattattttgttttaaaaaggaaggagaggttaggtgtggtggtttacgtttgtaattttagcgttttggaaggtcgaggtgggtagattatttgaggttaggagtttgagattagtttggttagtatggcgaaattttgtttttgttaaaaatataaaaattagttaggtatgggggtatgtgtttgtaattttagttattagggaggttgaggtaggagaatcgtttgaattagggaggtggaggttgtagtgagtcgagattatgttattgtattttagtttgggcgatagagtaagattgttttaaaaaaaaaaaaaaaaaaaaaaaaaaaggagattttgatatatgttatagtatagatgagttttgaagatatgttaagtgatagaagttagatatgaaaagataaatattgtatgattttatttttatgaggtttttagagtagttaaatttagagagatagaaagtgggatggaggttgttagaggttgggggaagggagaatgaatgggaagttggtgtttaatggggatagaattgtagtttgggaagatgagatggatggtggtgatggttatataatagtgtgaatgtgttttatgttattaaattgtatatttgaaaatggttaaaatggtaaattttttgtgatggatattttaaggtatgtatgtaaatatatagaagtagttattattattggggttgatggaaaagaaattaagaattcggagcgttttttatattttgttacgttttacgtttaggttttgttggagagtgtgtgattgttatagaaatttgtagtttattggtaataaaaaggtttttgttagaaggtgtagaaagagtggatttgtaggattagtttattgggtagtcgagaaatttattagagggtatgggtgggtaggagttgggtgtttgagaagtttgttgaggttttattgggttagagttggggtgttggagaaatttagtatagagtaggttttattgggtatacgttattggtagttgtgtttttagaggaaaaagagattttggaattaggaagagaagttgttattttagtaaggtttggtagttttttatagtgttgttttttgtggatagagtttgatatgattgtatttggttaaggagaaagatttataaggtttcggtttagtattacggagcggggtttggtaggatgtatgtagagttaagaggtaatatatgggtaattggtatatttttttagattttttgttttttttgttgttttgttttgttttgttttgttttgttttgttttgagagagtattttgttttgttgtttaggttggagtgtagtggtatgatttaggtttattgtaatttttatttttcgggtttaagttatttttttgttttagttttttaagtagttggagatgtttattatgtttagttaatttttgtatttttagtagagatagggttttattatgttggttaggttggttttgaatttttgattttaggtgatttatttgttttggttttttaaagtgttgggattataggcgtgagttatattgtatttggtttatttttttagatttttaaagtagatttttaggtttttttttttttttttttttttttttttttattttttttttaatataagtatttatagtttttttttaagtattagttttagtttacgtattttagtatgttgtgtttttattattattttatttgaaatattgtaaaattttttttgtgattttttttttgatttatgggttatttagaagtatgttgtttaatttgtaaatagttaaggtttttttgagtattttagagttattgatttttaatttaattttattttggttagataagtatattttgtatgtttttaaaatttgagatttatggtttagaatgtgtattttggtgaatgtattgtttttatttgagaaaaaaatatgtatatatattttagattttttgagtatagagttttataattgttgattaggttaattgttagttattagtgttttttagattatttgatgtttgttttttagatgttgagagaatggtgtttgttatggtttatttgtttgtgttttttaaaatttatatgttggagtttaatttttggtgtagtggtgttgggaattggggtattagggaagtattggtttatgagggtagagttatcgtgaatgggattagttttttttgttatgtggggatatagtaggaaaaggatatttttgaagtagggagttagtttttattagatattgagtattttgattttggattttttagtttttagaattgtgagtattataatttgtttataaattatttagtttaaggtattttgttttaatattttgaatgaattgaggtggtgttaaaatttttaattatgtatttaggcgtagtggtttatatttgtaattttagtattttaggaggttaaggcgggtggattatttgaggttaggagtttgagattagtttggataatatggtgaaattttgtttttattaaaaatataaaaattagttgggcgtggtggtaggtttttgtaattttagttattcgggaggttgaggtaggagaatcgtttgaatttaggaggtggaggttgtagtgagtcgagattgtattattgtattttagtttgggtaataagagtgaaatttcgttttaaaaaaaaaaaaaaagagtttttatttatgattgtggaattgtttatttttttttttaatttttttaggttttatattatgtattttgaagtttttttggttaggtgtatatatatttatgattataatggtgtttcgatgaattgattatttaattatgatgaatgtatttttttatttcgtaataattttattttggatttaattttattgatatttatgtagtttttttagtttttttaaatatgttgtttgggatgtataagaaggttggagaggtttatggagaaatttatgatggtttgatttatagttttttaattttattatggtgcgaacgtggtatgtatatagtagaaattgtattttaagtatgtgtgaaattattgtgttttttatttttagtatagtatttaataatttatatgagatagttaatattttattataaaataggttttgtgtttgttgattttgtttaattgtaggttgaagtaagtgttttaattatgttaaggtaggttaggttaagttagaatgttcggtaagttagatgtattaagtgtatttttgagatgatatttattttttatttatgatgggtttgttaagatataattttattattatttaagtagtattagtatgtttttttttaaatagaaaattttaatttgtgtttatattgaaatagtattttttgtagatagtatatagttgagttttgttattttatttattttgatagttttcgttttttaattggaatatttaggttatttttgtttaatatagttatagatatgattgggtttagagttattattttgttttttgatatttattttttttattttgtttttttggttttttttatgttaattaagtattttttagaattttattttaatttatgttttttttttttttttttttttaagatagagttttattttgttgtttaggttggagtgtaatagtatgattttggtttattgtaatttttgttttttgggtttaagtgatttttttgttttagtttttttagtatattgggattatagacgtttgttattacggtcggttaatttttgtatttttagtaaagacggggttttattatgttggttaggttggtttcgaatttttgattttaggcgattcgtttattttggttttttaaagtgttgggattataagcgtgagttattgagttcggtttgttttgattttttaattgtatttttttgtattgttattttagtagttattttatagattttattgtatatttttagttttttatagtttatttagaattaatattgtttttttttatggaaaaaaagtgtaagaattaggtaattttatgggtttatttattattttttattttgtatgtgatggttgttagatatttattatatttatatatattgtaaattagataatataataaggaaatttttgttttaaatagttttatgtattttaaagaaattaaaagtaaaatagaattttttttatttgtttatgtatttgttatattttgtgttttttatttttttttgaagagttgagtttttatttggttttattttttatgattttggagaatttgttttacggtttttgtagtgtaggtttgtagatagttaatttttttttatttttatttatttgtaaatttttattttgttgttattttttttttttttatttttatttttatttttgagatagagttttattttgtttttttataggttatagtgtaatggtgtgattttaaaatttttgtttaattttaatttattaatttttttttttcgggtttaaacgatttttttgttttagttttttaagtagttgggattataggtatgtgttattatatttagttaatttttgtatttttagtagagatgggattttattatgatggttaggttggtttcgaatttttgattttaagtgatttgtttgttttggttttttaaaatgttgggattataggtgtgagttattgtgtttagtttgttgttatttttgaattataattttattggttatagaattttgagttgttagtttttttttttaggattttaaaatatagggttttagtgtttttggttttcgttgtttttgttaaggaattagtatttatttagttatttttttgtagattatatgttgtttttttttggatgtttttaagattttttatttaagtttgattgtttagtatttatttttgggtaaaaaagtttttagaaattagaaatttatttagttttatttttttttgttaggtgtagattttattttagtttttatttatttgagatattttatattgattttaggttgttgttattttgtttttttaaatattttgtttagagttataatgttttttgtagaattgattagatagtagttattttttgtgattaggagttttgattttttagatttgttgatgggtttataaagtttttgttcgtggtttttagttggtagtggtttttttgttttgaagttgttatgagtgtgtaaaatttataggtttaattttttttattagtatagtttagaaaagtggaatttttggtttgggtggttatggtgttttagattattggttagattagggtggtgattgttagttggtcgaatgtggggtttttagtttagtatttttggattttattttaggagttatggttgttttagggttaggggtttggttttagtttttgtttttttttttttttttttaagttgtttagtattaggttttaattagtattttttgtagatagggtgggtcggttttttattagaggggtagggttgggcgggaagtttgttgagtttttttttttgtgtagtttatagttttggggttagttttagaggggtgtagaaaggagtttttaaaggtagaaatttatttttttttttgtttttgtgtttttagggataaaggagaggtggttttagttggggggttattagtggtatgtaggaggtttatatgattattgtttgttggggtttttttttttttgtgagagagacgagagagaggagagagagtgtgagttagggtagtgtttttttttagtaacgtagatttttgtacgtgttttttaggagaaatttcgttattcgttagagttttagatttggaagaagttttgtttttttttttttttttagtgtagtgtgtgtgtgtgtgtgtgtgtgtgtgtttttatatgtattatatttttttatagaggaaataattttcgtttaagtgtaaaggttgggattggagtaggtagtatgtgggttaaaggagtagagaggaggaaacgggggcgggggtgagggtgggaataggaggtgggtagatgttacgaggtatgttttttataattagaagggttggtggagatgattagaatgttttagatagattttttattaaatttttaaaatttaattttgttttatgaagtttgaggattttgtagagtgaaagataaggaagggtttttttgtaggggggtgtgtgtgtttgtgtgtgtttgtgtgttgtgtgtttttatgtgtgtgtacgtgtggatttgtgtggtgtgtgtttgtatatgtgtgtacgtgtggatttgtgtggtgtgtgttgagtgtgtatatgtgtgtgtttgtgtgttgtgtatgtatttgtatatgtgtatatagattttattttttttttttttggtttattaagtgttagaaagaattttcgtgagtttttttattttttttaaggttgtatatggagggatttgcgtaggtatatgtgcgcgtgtatataatatatatatatatatatatatatatatatatatatatatacgagttaggggcgagtatttttgtggattgtatttaggtttggtaggaaatcgggttttgggaaattgtaggttttatttttggtagaaaattatgtttttgttgttgttcgttgaagggaatattaagtggggttggggatagtttatgttgagaagagtaaattttgtttatggtattggggatattgagtggtttttgtttcgggttttggagggtttgggagatacgtttgtagttttgggtattttttaaggttacgggcggttatatttaaggttaggtttttttttgtgtgagttgcggttagtaggaaggttgattttagaggcggttttagggtttttggaggttttgtttttgagatatgggttaaggttagagagtcgagaaggttgttgttgaggattttggttggcgtttagtttagcggttttttaggcgggttttgtgtaggggttgatgaagttagttgggaaatttgtgaaataaagtataggttttttaggtttgtttagagtttcggtattagatgaggtgtagagaagggaattgagttgttaagtgtgaataggagagaggagttttaggattatataggggtttcgatatggtaggtgtttggttagtagcggtgttgtttttattgttggacgtgggaaaatgtattgatatttgttgattagagtcggggtgagtatttgggtgattttgtagatgagataaaataagggttgtcgtgggggaggggtttttgtcgggttattttgttgaggttttgtgttattgttttgcggttgttataataaaggattataaatgaggtgatttaaaatattcgaaatcggttacgtgcggtggtttatgtttgtaattttagtattttgggaggtcgaggcggttggattacgaggttaggagatcgagattattttggttaatatggtgaaatttcgtttttattaaaaatataaaaaaaaaaaaaaaattagtcgggcgtggtggtgggtgtttgtagttttagttgtttaggaggttgaggtaggagaatggtatgaattttggaggtggaggttgtagtgagtcgagatcgcgttattgtattttagtttgggtgatagagtaagatttcgttttaaaaataaaaataaaaataaaaataaaaatattcgaaatgttttttttaaagtttttggagttagaaattttagatcgaggtgtttgaaggtttattttttttgggggtttcgagggagattgttttatgttttttttcgagttttgcggcggttagtaatttttggtatttttcggtttgtagttcggtttattttttatttggtttttattttgtgtttttttttgtgtttttgtttaaattgttttttttgttgtttttttaatttatttttagggataggtttttattttgttttttaggttggagtgtagtggcgtgattatggtttattgtagttttagttttttaggtttaagtaatttttttattttagttttttaagtagttgggatataggcgtacgttattatgtttggttaattttttaatttttttgtagagacgagggtttaggttggttttaaatttttgcgtttaggtaatgagattttgttttttaaaatattgggattagagatatgagttgttgtgtttagtttatttttgttttataaagatatttgttattggatttagggtttattttgatttaatatgtttttaaataatttaattatatttttaaagattttatgtttatataaagttatatttataggtattggggggttaggatttgtatatgttttttgggggaatataatttaatttataatgggttttatttatagaacgaacggtttttttagggtgtgcgtaggtgggtgaggggtttaggagagggatttgcgtggtaagagggtttgtgtttacgttagagattttagaaggagattggatggggtggttgtatggagtaaggggttatagttattgtttttaagtagttggtgggttgtttggtagaaagggagtatttattttgagtttttttaagatatgaagttagtattaggtatttggaaggtgttagcgagtagagtttgattttttatagaaagaggtgttttttttataatgtttatttgaggacggtggaataggttattttataaggtagtgagttttttatgtttggaagtatttaagtaggggttatgtgggagttgtttaggagtgtatagaagggattttagaggtttttgttaatattatttttgtttgttttattttacgataatttgaattttagaatgtaatgttattggggatatgtttattagaggggtttttagtattaggttttatatattatgtattatttttagggtagggaatgagagtaggttttattttttttggttgtttgtgaggattaggaggtttgttgttgaggtagttttttgtggaaatagtgttttagtttcgtaatttatttatcggagttttaatattttaatgaaatattgtgttagatgggttttgggtatgtgtgtgtagattgttataagtttatgagaatgtatatacgtatattgtatgtgtgtgtatatatgtatgtatatatgtataagaatacgaagattcgaggtaggtatagttcgtgagatagatttttttaggttgaaagattttttataagggtttttagaataaggttttagtttcggtagttttttttatttttggtgggaggatttttatagagaagaagggttaagaagtatagtttttgatgtttacggtgtattaagttttgttttaagtttgtgttttattttttatttatttagtaaatttgtcgtttttgttttgtgttagatgttgtttttagtattttataaatattgatgtatgtttgttttatgataattttgtgaagtaggtagtgttatttcgttttatagatgaggaaataggcgtagagggataaagggatttgtttaaggtttgtttttattttatacgtatatgaacgtttatttatgcggtaggcgttagtttttttttgatgtgagttaggttttgagttggttggggtttgggttttattttggttgtgttttgttgtgggtattaaggaagtttttagtagttttatttttttggtatgatttagttttagggattggatttttttaaatgtttttgtttagtttggagttttttttttagttgggggagggttgaacgattttttatttttggaggttgtcggagttttttttgtttgtatgcggtcgttgtcgggtggataggtttgtttgtgggttgaggtttttagtagttggggtggattatttttttttttaagaagttttgggagaagtagttgagggggttagcgtttttttgaggttaattttttgttttttttagcgtaggcgcgaagttatttttgtttgtgtgtttgttatagatagtggagggcggtgtaatcgtgacgtttgtttgttgtattttgcgtttttgaggacgttgatttttggtcggtgttgggcgtttgttttttagttattttgttttgatttggcgtggtaggttcgagtattgtttttttataaggaaataggtttagaggttttgagttatttgttcgggtttttttagttaataattggttgagttaggatttttatttagttttgtgattttagaagtttaagttttttttattacgttagggttaggaaaggattagaatgtttttttacgtgtcgattatttggatgatttgtgtagtttagttcgttgtagttgtttaataaaaatgtggaatgaatgggtttatatgttttattgtgtgatttagagttaatgattttggttgatttttttgtttttatttcgtggtttagtatttttttttggggtgtgtgattttggaagtagtgattttttttattttattttgaatggtgtttgcgtcgtagtaggggagtagttggggattgttagcgtttgttgttggtgggttgtgcgttagatttcgttttggatgtgtgggtgattgttagttatatgtgtgtgaagggttgtgcgtgtaggatttgtgtaaatgtgtttttttttgttgttagtttatgggaggttgttaagattttgtttttgtatattagtttatattttttttgtggtttattgttgtggttgtttttttgtgttacgtggttgtaggtatagtttttaagtggatggggatcgtgggttgaatgtgtattagatgtttttgttttttggtgggtggagatttttaatttatgtatcgtggttgtcgtatttgaaaggttttttatggtgaaggatttggatttgagtaatttttcgtagaggttttagaagtgttttttggtcgggcgcggtggtttatatttgtaattttagtattttgggaggtcgaggtgggcggattataaggttaggagatcgagattattttggttaatacggtgaaatttcgtttttattaaaaatataaaaaattagtcgggcgtggtggcgggtgtttgtagttttagttattcgggaggttgaggtaggagaatggcgtgaatttaggaggcggagtttgtagtgagtcgagatcgcgttattgtattttagtttgggcgatagagcgagatttcgttttaaaaaaaaaaaaaaaatgaagtgtttttagtttttttttttgtggtgaggttttgagtttttatttttagaagaaaatttggttggggagggtatttttagattcggatataaacgttaggagattagggttgtttttttaggtgattaattatagagatttagggaaagttacgtttggaagaggcgatattgtgttttagttttatttatttttttattttatagatattgtttggtgtttagttcgtatcgcgaggttttttaagtagttttgggtatcgtgtatttggtatggtttttagttttatttttttgttttgggagattcggtggggatttcgggttgagtttttgtggttgtggaattttggtggtttattgtggtggttgagaatagggacgtggggttggacgggttgagtgtaatttttagtggtttcgtgaattgtttgggagttttgggtagtttttttttattttgtgttttcgttttttgatggaaaaatgggggttaggggggagcgattttgaaggtattcgtgggaattaagcgaggtgataaatgtagtgtttttggtagagaattggatatagagtttatttttatgaagggggttgttttttttttttttatgtttttttttgtttttatttttttttttgtattttttttttttgtttttttttttttttttttttttttttatatgtaggtatattttatttggtgttttaattgtttttttttattgtttttttgtaagtggttttttaagtgggaatttaggtttggaaagggtgggtattttgtttggtgggttttggtaggttaggcgttgagtagttttaggagatataattttaggaaaaggtttatgtaggttggttgttatgacggattgttggtgggagaggggaaggcgtcgtggtaggggaagttttggaaatatttattagtggttttatttatgatttaggatatttgttaggttattagaatatagttgaggaagttgtcggttagacgtttagaagtattaatttggtggttgggttgtggggggatttttttggataggtagataaggtgtcggaggaaggggttgatatttatttagtgtttgttatgtattgagggtataaagggtaggatggagagttggtttacgttatttgtggaattttttaggtgtgggggtagatggggaagtaagggggtttgaagatatatgcgtttattaaatgtttttaaattttaagaagaagaataaggatatatttataggggtagggttgaaagtttgatgtatggtgttttggggtttgtttttgttgtaatagttatagtggtttttttttattttttttttttttttattttgttgtgaaaatgtttaaaatatatggttaagttgaaagtattttatagggaatatatttagttattatttagattttattattaatattaagttatatttgttttattattttatcgtttatttatttttttttcgtttggttatgaatttattttatttttattttttggtgtattttaaagtaattttaggttattttgattatttttggaattattgttagaaatttttttttttttttttttttttttttttttttttttttttgagatgggattttgttaggttatttaggttgaagtgcggtggtgtagttatagtatattgtagtttttaattttcgagtttaagtaatttttttgttttagttttttgagtagttgggatcgtaggtatttattattatatttagttttatttttaaaattttttattaattttttattttttgtatttatttaggattattttttataaagttagggtgttgtaggaggggttagaattttaagttttaattttggttttgttattaatattgtgcgatttttagtaaattattttgtttgtttaggttttgtttttatttttatgaaacgagggcgttaaattgtatgttataaataatgagggttattagttattaagtttttattttaggttaggtattttttatatgttattatgagtttttttaatttaggtattgtttttaatggatagtttagttaacggaagtttagagaggtggtgtaatttgttaaaagttttattatttagtgaatgtttttacggggtttgtatttaggagtttgatatagagtttaggttttagtatttggcgatgttttgggggtgtgagtagtttagtttattttgggtacgtgtttatttgttgttttttttgttttatgtttgtgtttgttttttttgaagtttagattgttattttttagttttaaatattaaaattggttaggtacggtggtttatgtttgtaattttagtattttgggagattaaggcgggtggattatttgaagttaggagtttaagattagtttggttaatatggtaaaattttatttttataaaaaatataaaaattagttagatatggtggcgtgtatttgtagttttagttatttaaggagaatttagttatttagttattgaggtacgagaattatttaaatttgggaggtggaggttgtagtgagtcgagatcgtattatttttttttaggttaggtaataagtgtgagattttgttttaaaaataataaataaataaaataaaataaaaattaaaattaaatgttaaaattaatttataaaataaattttggttaaagtagtttgtttattttgttttaattatgtatattgtattagattttgttaggggtttagcgtataaagatgagatttttgttttgttagataggtgggatgatggttatattttgagttagttaaggtattatttggttgtgtaataaaagttaaaatattagaggttgagtagtattcggatttacgttttagtttaagtgttagtcgttatgggggtttaggatagttcggatttagtttatttttttggtgtattttcgatatatagtttttattttttgagttgagatggttttagtttttgtcgttatgtttgtattttagttagagggaagggaagaagggagaggggaaagggtaagtgtttttttttatttttaagggtatgatttgaaagttaaatattttagtttttttttattggttagaatttagttgtatggtcgtttttgttattagggaggttgagtaatgtattttttagttgggtttttttgtgtataattaaaattttagttattatagaaaaaagggagtttagatattggggaaataattagtatttgtattatatgtattgatagttttttttgtatgaatagagttgtggtaggttttatgttagggagaaagtaagattggaaaagagtttattaaggaggtggtatttgtattgtgtttaaggggtaagaaaaacgttttttaattaggagttataaatgtttggttgaagtgttattgtttttttattttggagttggaatagacgttattagttaattatgatggttgttgggtgtattggttaatatttataattttagtattttgtgaggttgagggtgggaagattgtttggggttaggagtttgagattagtttgggtaaattgtaagattttgtttttgtaaaaaaatataaaatgtagttgagtgtggtggtatttgtagatttagttttagttattcgagaggttgagatgggaggatcgtttgggtttaggagttcgaggttgtagtgagttatgattgtattattgtattttagtttgggtgatagagtaggatttgtttttaaaaataataaaataaaattaaagttttaaaatggaaaaaaaattatgagtatataattttagatgtatttttaagatagtaaattcgggtgggcgtagtggtttatgtttgtaattttggtattttgggaggttaaggtgggtggattatttgaggttaggagtttgagattagtttggttaatagttttatttgtattataaatataaaattagttgggtatggtggtgggtatttgtgattttagttatttggaaggttgaggtaggagaattgtttgaatttaggaggcggaggttgtagtgagttaagattatattattgtattttagtttggagaaaaaaagtaaaattttgttttaaaaaaaaaaaaaaaaagtaaatttagggttaggtttgtagttatatggttatttttttttttgagtatggaggtagttttagaaatttgttttatattatattagtgggtagttgattgggttagtttgttagttgaattttatttgttatagttattttttatagtaaggggtattttagatatatttttttttttagggaagaataagtcgtagttgtttgagcgttttatttagtggtgtgtatgtttttttttaattttgtgtttagtgatgttttgtttgtagtttgaaatttgttatagtgggtgtgtttatattataggaattggtaaatattatatattaggttttattttttgttttttattagggtaggttgttttttttttgttgtttttgttttttgtttttttttttttttgagacggagtttcgttttgtcgtttaggttggcgtggagtgatgcgattttcgtttattgtaagtttcgtttttttggtttatattatttttttgtttgagtttttagaatagttgggattataggcgttcgttattatattcggttaattttttgtatttttagtagagacggggttttatcgtgttagttaggatggtttcgattttttgatttcgtaatttgtttttttcggttttttaaaatgttggtattatgttattgcgttcggtttagggtaggttgttagaaatgtattagtttgttagttttagttttgtttgttttttattttttttttttttttttttttttttgagacggggtttttttttgttgttttttaggttggagtgtagtggtgtgattttggtttattgtaatttttgttttttgggattaagtgatttttttgttttagttttttaagtagttgggattataggtgtttattattacgtttagttaaattttgtatttttagtagagatggggttttattatattggttaggttggtatcgaattttttatttaaggtgatttattcgttttggttttttaaagtgttgggattataggcgtgagttatcgtattgggtttttttcgtttttttttaatgaaaatttttttgaaagatttgtttattgatgtttgtgttaataggtattgtttgcgggatagagtttgttttttttttgaaggtttttttttgtttgggtgattatttgtatgttattttttgttgtttagaattaaagatgtagttatgtttggggtaggttgggaaaatttgtgggaattatagagtttgttgttatgttgtgttttggatatttgaagtttggtaggtaggtgggatcgagggtgggtattaggaaagtgatgtggttttataggaaggggatataggttttgagattttaggtttttaattggataaagttgttttttttttttggataaatgttttagtttatttataatcgagtggttagtttttttttttttttttttttttttttttttgagatggagtttcgttttttcgtttaggttggagtgtagtggcgttatttcggtttattgtaagtttcgttttttaggtttacgttattttttcgttttagttttcggagtagttgggattataggcgtttgttatcgcgttcggttaattttttgtatttttagtagagatagggttttatcgtgttagttaggatggtttcgattttttgatttcgtgattcgttcgtttcggttttttaaagtgttgggattataggcgtgagttatcgcgttcggttaagtggttagtttttttagttgtcgggttttgtatattttgttggttttggagattatatgtattatgtagattttatttgttttttatttttagtgttgggggaggggttaagggtttgtcgatgtgttgatatttggttatttattggttttgaatgtttatatttatttttttgaaatcgatgtttcgtatcggaggttttatgtggatttgggggtagaggtttgtattttagatggtggggtggtttttattaattaggtagattttttgttttgttttgttttttgggttttgtagttttagatgtgtgtttaagatttgtggttatatggatgggataagttatagagatttagatttcgtggtttttgtgattagagtagtcgtggttttgtttgggaatgtttttattttgttgttgaaggtgagaaatttttttgtgttggagaatagttgtgttgagaagttggtttatttggtttgtaggattgttggggtaagggaggtttgttgtcggttttttttttttttttttgattgggtgttttttgtttaggttttttgtagtaaaagaattttttaatttattttgtttttttattgagtttttattttatgaagtttattttttaattttagttgattggtttttatttttttaagaggaaggttaggggtagacgaggttgaaggaggttgatttttttgtgttttcgtagtttgagttgatgttgttgtatgtttatagggtttttttagtttttaaaaaggttttaatacgttcgttatacgtttgtggtttttttggatgttatattaatttagtaaggtttgagttagaggttgtttttgaggttgtgaaaatagaagaagggtttagaggagaatttttttatttgacgattttaggaaggttttttagaagaagtagtttttgagttgagatttgaagatagattaggtttgagttaggttagggagggtgtgaggggtttattaggtagagggaataggatagggtaggtatagaggtttggtatttggtttgtggggaagtgtgagtttttgggtatgattaaggcggggagaagtggcgtgagaggaggtagatgtggttggtaggagatcggcggtttcggttttgttgagttttattttgtatgtattaggtgatagaggttgtttaggacggtgggtagggaagtgataggttatatggttattttattaatagtcgggagtttagtttggggggatttaagattttggggaaggtacgagttaggggtttgttagagttaggagttagtgggagaaggaaatagtgttgtttatgaattataaatagatattttcgtaattttttttgacgtgatataattttaaagtgggttatttagaggtgggaaggtgatttttggttttttaggttttgggtttgttttttttttttttttttttttttttttgagatggagttttattttgttgtttaggttggagtgtagtggtgtaattttggtttattattatttttgttttttgcgtttaagtaatttttttgttttagttttttgagtagttgggattataggtatttgttattatattcggttaatttttgtatttttagtagagatggtgttttattatgttggttaggttggtttcgaatttttgattttaggtgattcgtttattttggttttttaaagtgttgggattataggtatgagttattgtgtttagtcgagtttatttttaagttttttttggtttttagtgtttttgtattagtttatttttttggttttttgtttttaagagttttttttaagattgtttttaagtggataggtttttagaattaaggagtagttttaggagtttttagttatagatattttagggggttcgtgtggtttttagtttttggtttggtttcggtagttttggttttttgtgttgttttttatatagtttggttagagttggttaggttttttggttgggtcgagttatcgtggttagtgatttatgtagggggagaaaagtgaggagggggaatagagtgcgagggggattgtgttaataataaatttattaggtttttgaggttattttataggagggataaatggtttatttaggttgatttggttgtcggttggtttttagagatatttagggtggggaagattttattatttggggaaagtaatattagattgtttggaggggtttagttagcgtatttcgcgttttttgtttgttttttacgtagagcgttttgtttttaaggcggtaggttaagagcgcgagtcgaggtttaggtgtaaagaggggtgcggtatgggggtattgtagggtacggggtgtatgtatttttatttatttttttattgagtgttagggtaatttgttaatggggtatatttggtgatataaaattttttgtcgatttatggtagtttggaacggagtggaagcgttttatttttggggaatttttatatatatttggttgtgaacgtcggtgtttttgtattggagtttttttggagtgtgttgggtagagcggagaggtttttttttttttttttttattattttgtggaggtgttaatatgtagttagagatggttagtggtagtgaggagaggggggtaggaagagattagggttgggggtttgttagtttatagttttatttttgaatatttatggtttttttgtttaggttagcgaggttgggggtagagacgggtaggggttttttaatgttgggtattttttcgtttttttatattttggatttgttttttggagaaagttttggagtatttagaagttttggggttgttggttgaggtggggagtagagtttagttgtgtttggaggttttttatttttatttagtttttagggatagttttagttgtgtaggtttaggtcgttgaggttggttttagaaatttttttataattattattggatggaaaattagttttttaaagggttttagagttagttttgtttttttttttataggtttttatagttagagtatcgggtttttgttagagatgtagaagagacgatgtttttagtttttatgtggttcggtttttattgtggatgttggtgattttagttttttttttaaaattaagagggttgatgttttatattttaggtttttagaaagagtcgttatttatttatatcgttatattttttttttatttttttgtttcggaaagagtagagtggatatgcgtttttgtagaaatttatttatagtttgattgtagatgtattttgtttttttattgagtttttgttttatgaagtttgttttgtttgtatttttttttttttttttttttttttttttttttttttttttttttttcgtttttttttttttttttttttttttgttttattttttttttttttttttttttttttttttttttttttttttttttttgttttttttattttttttttttttttttttttttttttttgaatagttaaagatagaatgaatggtataggtaggtattgagttttttgtaattggaggtgtttaagtgtagggtggatgggtatttatagggtaggtattgaggaaggatttttttgggattgtggatggtaggataggttttgtggagttttttgagcgggtgtagaagagggagggtatgtttttgttttttgtttttttcgggttgttaggtcgttatttttaatttttattttttttttttttatttgttgggttttacgggatgggtagaggtattgttagaatatggagtcgcggtttatagagggttagtagggaggagagttttttggggattacgtcgttttagttattgtggtgattttgaaaataaatgtttttttttttgtttgagtttttgttgtttttgttgacgtggaattagggtaggttggtgatttagtttttatttttgtattgtatcggtggtaagttgtttttagttttagattttatagagtagggtgttttttttagaaaaatagtagggaggttaggatattaagggttttagggatagtttgttttttttggttggtatgagttttagttaagttttttggtattttgggggtgaggaggtattagttgtgtgttttagttattggttgttttgaggttgggtcggtgttaggttggttatttttttttgttttttagtgtgattttgtagagttttcggaagggttagagggtttttttttattattggtgtttatgggatattgtgtttttattttatttttgtattttagttttagacgggtgttaggaagttggagattttagttattttacgattgtgttttgcggggttggagtaggaataggagtaggaggaacgttttggttatgggattgtgtgaagagagaaggattaggaagaaaatatgagttattatgtttgggttatattttagtagagtcgttggtggttttttaggtatttgaatttattaattataaagtttattaggtgtgtaaataaataaatgttgtttaggaggtatagttagggttttgttggagagggattattttggaggggttatattttttatttagttttttagtttttttgttttgtgtgtgtgtagtttttgattattattatttttgtttttgttatttgtttttagggttttattaggttggatgttattgtaataaaatgtagtaatagaaggtttaggtagtgttgtagtttttggtggtattattagagttagtaggtagtagggttggggaattttaagttgatttagttttaagtgtcggagcggggagttcggatgaggtgggggtggggaatcggggagttatggagtagagtatttgttgtgttgaaggttaggagtttttttgggagattatgaatttagaatattaatattttgtttaaaaagttttttgttttggagataagagtttaggtcgttgtggttaggttttgttgtaaatgttttgtataaagtaggttggggggattattgggaagtttggggaatagattggttatgtgtttttttgagtgaaattttatggttgtattgaagcggttaggtagagggtgtgatggggtgtggtagttgtatatcggtttagttaggttgaatggggaaatgtaaatttaggtggtttgaaagagatttagtggtttatagtttggtggttgtttttagtataggtgatgtaaagagagaaggggtttcgggggtttggtttaggtggaaattatgtattgtttgtgattttgggtatgtcgaggttggagtaggtttgtttggtggttggtagaacgtatatgaagaatttatgtgtgttttgaacgttttttttgtttttttgggtttatgttttattaggagtttttcgattttgttattttgtaaaggaaattgcgttttgttattgtataggatcgaataggtgtgtgtggagtttttaaagttattgttttaaggggttttatgggataatgggagagttgttgtgatgtttaagattaaagtgatggttgggcgtagtggtttacgtttgtaattttagtattttgggaggttgaggaggatggattatttgaggttaggagttcgagattattttggttaatacggtgaaattttatttttattaaaaaaataaaaattagtcgggtatggtagcgggtgtttgtaattttagttattcgggaggttgaggtaggagaattgtttcgatttgggaggcggaggttgtagtgagtcgagattacgttattatattatagttcgggcgatagagtgagattgtttaaaataataataatgttaataataaataaaataataataataaaataataaaagtaaggatttgaataaatatttgtatatttatgtttgtagtagttttatttttaattgtttaaatgtggaaggaatggatatataaagtgtgtgtatatatagtggaatattatttagtttttaaaaggaacggaattttgttattatatgtgaattttgaataatgaattttgaagattttatgttacgtaagtttgttttataaggataaatattgtatgattttatttatgtgaagttaaatttatagagaaattggaatgacggttgttagtagttaggggaaggaaggatggggagttattgtttaatgaggatagagttttagtttgggaagttggaagaagtttcggaggtggatggtgttgatgggtgtataatgtgaatgtatttaatgttattaatatggaaatttggttaaaatggtaaatttgttttttttgtttttgttttttttttttttgagacggagtttcgttttgtcgtttaggttggagtgtattggcgtgattttggtttattgtaattttcgttttttaggtttaggcgattttcgtgttttagttttttagagagttgggattataggcgtttgttattacgttcggttgatttttgtatttttagtagagatagggttttattatgttggttaggttggttttgaatttttgattttaggtgatttatttattttggttttttaaagtgttgggattataggcgtgagttatggtggttggttaaaaatggtaaattttatattatatatattttattatagtaaaaatgtattgttttattagaaaaatgatagatttttataatatgaattaaattataagttatgaaggaaaaattaagtaaaatattaaaaaattatttataagtaattatatttaaaataaaagataataaatatataatttttattattttttaggttttttgtaatatttaattattgtttgttttgttgcggttatgtttttgaggttgtatttgtatgatagaaatattatattcgtggtgattaaatatttttttttagttttatttttaatgatgttatatagataatttgaaattggtcggttgggtacgatggtttatgtttgtaattttagtattttgggaggttaaggtaggtagattatttgagtttaaaattagtttggttagtagggtgaatttttatttttagtaaaaatataaaaattagttaggagtggtggcgggtgtttgtaattcgagttatttgggaggttgaggtaggagaattatttgaatttgggaggtggagtttgtagtgagttaggattgttttattgtattttagatcgggtgatagagtgagattttgttaaaaaagaaaagaaaagaaagaaattggttaaggtaggaatattgatattataggaataggtaagcgttataaatcgggaaattgagtgttgttgtttttgttggttttaggtggtcggttgttgatcgttaattggtatattattggaggagggaggtttagattgattcgtagagagattagaggtagaaacgtattatggtttggatgttgagggtgagggaaagagaggagttaatagtggtgttcggagatttggtttgagtaattaggtggatggtagtatcgttttttaagatgaggggttgtgggaatttgaggggttgtggaaggttttgttattgacggatttagggttcggtagttttgggaggtttattttgtgttaggttacgtagagataagattatttgggttttgtttttgggaagtttttgtttatgaggatatagtttgttatttaatggggtgtttcgtttggagttttagtgttgttgggagaaagttttttattttttttcgtttttcgagttttttttgtttttttgttagttgagtttttttatggaggttgtgtttggaggggggttatggatatggatgtgtgcgttaaacgttgttttttcgtggattttttttttatttcgtttttacgttttgtaagttttattttttcggggtttgatttgtggggtttttttttagatttgtttttttttatttttagaaaggcgtgtaggggttttttatggtttttttttttgtttttatttttttttttttgggatagtgatttgttggacgggtgggttatttatagggtttgtgattgtttagatatttttgttgtatgaagttttgattttaaggtatgatgtagatgggaataaggtacgagttttttttggttgttgtaataattgtcgaaattgggtggtttatagtaaggggaatgtgtttttttatagttttggaggttagaagtttgaaattaaggtgttagtagggttagttttttttgaagattttaggggaaaatttttttttgttttttttagtttttggtggttttaggtgttttttggtttgtggttgtattatttcggtttttgtttttgtttttataaggtttttttttgtgtttttgtatttttttttttgttttttagaaggatatagtattgaatttagggtttattttattttgagatttttgtttaaattttttttgtagagatttttaaatagaattaggttatatttgaggttttaagtgggtatatttttgttttgggggggattatcggtttattgtaggtttcgttgtgtattgaagacgtaggcggtttttttggttaggtttgtagtcggttttgtttttttttgtgatcgtggaagaatgtattttgttggatgtataggtttttatagtttttttgtttttgttaaattttagtttagttttttttttgttgtcggcgtgtattttttttgtttagtgttttttttgggattgtgtgtttaggttttgaggttttagaaaaggggggtggagggtttttttattattttgtagtaatgaggttttattaaaattttggagttttagattggatttagtttttagttatgattaaaggatagttcgggatatgattaaagggttagagaaagatgatttaggttgagaaagaggaggttaaggagtaattggattgtttttgaatgtggaaaaggtaattatgatttgaagggtggtgtttagttgttttttattttttttgaggataggaaaaaaaaggaaataaatgatgtataattagagtagttggttagatacgagggtgaattttttggttgggagtatggttaagttttgatttgggttttttgaaagagttcggggaatttttttatttggaggtttttaggtttggttatgtggttttgagtgattatattgaaggggtagtggttggggttggagtcggtgggttttgagtatagttacgaaggtatgcgtattttttggttgtttttttgttattgttttttgggtttttattttggtgaggcgtgtattttggcggcgttttttagggaattaaatatgtttgttgtattgtgcgtggagatggagaatgtataattggttgattttgtgttaatttggtggaattttatgttagttttgggaaagaataattgtatgggtgtgtttatatttattaggtgttttttagaaaaatattcgagaataatgttgtggtttaggatggttgttgtgtcggattcggtatttttttaggggggttgtgttgttgggttgagttttttaggtattggatttttaaatttttaaatacggcgtggataggtggtttagtaggggttggattattcgataggtttaggtgttggagtttagataagatatattttggtttggcgtggaagatacggggtgttattaatggtagtaatggttgtatttttgaaattcgggtttttaggtcgacgagggtgtgtacgtatttgaaatgtttgtggttttgtagtttttatgtttataaatttatttggttgaaaatagtttaaaatatttaaagtatgagggagggagtgtttgttttttttaaaaaggaaggatttgattttatttatttaaaaagttatttaaatttagaatatttttcgtaagagattttttgtttttcgtttttttagaatggttggagagttttagtatttttgtatatttgggatattttagagggggtggggaggggtaagtgggtagcgagcgattttagatttaggatgagttgttaggcgtttttcggttatatatttaagggatcggagtgtagttgtagcgttgcggtttgttgtttcgggggtgggggtgttgttttatgttgtgaatttttatatggtttttgattttgggtagaggtcgagggtttaagggacggggtgatagggagagtatgtaggagtgggtttttggttttttagggcgagtggaagaagcgttttttttttttgtaggtgatagatttggggggttttttttgaggatgagagtttgttgttttttaagttttgtgtttaatttaggtttttaggtttattttagtttttcggttttgtttgttttgtggatgatatagtttaagggtagagatcgttggtttggagggaaggttaggttttaggttagggtttagaagggagggagaagtttttggggtagttttttttttgtttatttattgtttagtttttttttttatattttttttcggaaacgtttgtttttgataaggtttattttttgtttttaggaggtttttattgtggaggaagggaggcgtcgttcgtttttggtttttttgatagtcgtgttttattttcgttttgtgttttttttttcggatagtgttttttttagggtttatttaggagggtgtagcggtggttttcggggcggtggtcgtggtgggggtgttagttgtaggggtgttttcggtgggtgggagttggtggtttttcgttggtgttatgggattcgtatgttcgttttgcgtttttcggtttttgagtttataggtcgggattttgtttgttagtcgcgtgcgttgtcgtttaatttttgtaggcgtagagcgcgcggcggcggtgatagagaattttgtttggttgtttaaatatagttttttgtagaaggattttgcgttcggggaaggggaggaatttttttttttttgggcgttcgtttttttcgttatggttcggtttttatattcgtttatatttggtcgtagcggggcgttcggggggaggggttgaggtcgcgtttttcgtcgttttttgggcgcgggttaggcggggaggaggggggcgtttcggtcgtgtgtttaggattgttttttagcggttattcgggttttagttttttaggtttggttttgataggcgggcggagtagttagtgcgagatagggaggtcggtgcgggtgcgggaatttgattcgttcgggaggcgggggcggggcgggggcgtagcgcgcggggaggggtcggcgttcgttttttttttttatttatttagttgagttagggggtttaggggttttttcggcggttagttttgtattgtaggagcgcgggcgcggcgttttagttagcgcgtagggttcgggtttcgtcgggggcgttttttcgtcgttgtttttcgcgcgattcgttgtttattagttattatgtcggatttcgcggttaacgcgtagttggatgggattatttcggatttcgaaggtgggtgttgggttggttgttgcggtcgcggacgtgttggagaggattttgcgggtgggtttggcgcgggacgggggtgcgttgaggggagacgggagtgcgttgaggggagacgggatttttaatttaggcgttttttcgttgagagcgtcgcgcgttttcggtttcgtgttcgcgtcgtttacgtgggggattttgttaggggtattcgcgtagattttgcgcgtttttataggattttgtgttcgttttgcgtattgtcgtttgggtttttttttttttattgttgtttgtgtttgttaagcgatagcgattttttcgagggttcgcgaggttgtttcggaattttttaggacgtatagttttattttgggaaatttatcggttttttttttttggtttttttcggcggttttcgggtttcgtttggattcggtaacgggatagggaggtcgttttttattttcgattgagtggatagtcgcgttttgttcgggtggatagttttttttttttttacgttagtttcggggtcgttaagttgtgtagttcgtgggtcgggagtatcgaacggatatagtttaggtcgtggtagggtttagagtgggatgttttatggtttttatttaggtttggggatatttttattcgttttttagaatcgggtcgtgggggatagaaggggtttgcgtgcgggtagggagagtattttggtttttttttgttttcggggtttataaagtgtgttgggatttgcggggttgttttgtttaagtttgggtttggcgttcgcgtttttgagtttgtgagtgcgtgcgtttttttgcgtttttttgattgtcggtgttggggttttgcgttttgcgttcgcgggagtaaatatagtaggcgaaggggaagtttatataatggtttttagcgttttggggtagggtttttgaggggcgggtttgtttttgtcgggatttggagttttcgtttttcggagaggtttttaggttgatttgggtagagttttttggtgggtcgggagggggaaaggttgtgttgaaatgagtaaattgtttaggtgttaggttaagttgggaggtgattagtttgaggtttttttcgttttatggttagaattagggttgatatttgggtgttttgagtttagttgtttatacggtttatttggggttagttttatttgagtgggggaggcggggttttttgggggattagaattttggttggacgttaagtagagtgttagtggttgttttttagggttgggtttgaggagggtgtggggcggcgaagggacgggagggggttgtgatttagtggttattggcgttgtgtagagtgtgagttggaaatatcgtagttattttgttagtttagtggtgaaagtttttttttaggttttatttttttgtatttttgttttttagagggaggggaggtttgggtttgtagagttgggagggtttgttgttttcgttttttttttttataatatttttttatttggatatttttgggtatatgtttatattggggtttttttaggtttattgtgtttcgttgagttttttgtagttttcgagtgaatgtgatttttttgtttttgtttttttgtaatttttttttgcgatcgtttttttaggggttttttttgttttaaatgtttaagtggtacgatttagtcggtttgattattttttagtaagtttttatggagagaggttttgtgttgtgtagagttttttttttgtttgcgggatcgaggtttttgtttttagtttttaatagaaagtgtcgggtttttagtgggatttttggggaagaattttcgtgttttaacgggagttttgtggcgggaggggaggttagggtttggggttgtgttcgttgtatagttgttattatttgtattatgaaagttgttagtgttttttttttgggtttttgggtgtaattttatttttgtttttatgtgtttttatttggagttgtttttgcggttgttttttaagttagttttgtgattttgtaatttagtttaagataatgggtttattgagattattttggtgtagtagttggtaattttttggttttgggggaaggttttttagtttcggggagtggggttttaatttgttggttttttgtgtttattagttttttttttgtgtgttttgaatggttttgttgggaattttggttttagagttattaggtggttcgagtcgataggcgtgagagagtgtgtgtgtgtatgagtgcgtatgtgtatgggggttgatttggggtatggaaaggtggttttttttggtgtttaaggagtttggagtatagttggagggtgtgggggtgtgtatatgggagttggataattttgggtggatagatagacgtggggaagggatgattgaaggaggtggaggagagagtgtgatttagtttagttaggggtgatgtggataggtagttttcgaattagggtagagaaaagttattattagttagtaggggagaagttagtatggaggaggcggattttgagggagagtaggaattggattgtaagaggaaggagagttttttggttagtagtagttagtagtagtgggggaggttggaatgagttggttggagagggggttggggtataaggaggggtttgtttgtgaagattatatgggttaggttgcggagggttaggtatgttcgtcgggagtgtagttggtttacgggaagtatttggagtggttgggaatgggcgtaggagtagcgtcgtgggagtataggtttttttttcggggcggtttatttggtgttttggtttttgtaaggtaggtcgaaagggtggggaggaaattgttagttttttatagcgttgggatggtggttttagggtttttgaggttagcggatgtgggtgtttgttattatgtgggttgttgaggggcggagattttaggggttattttaaagtaggacgagttttgagttacggtatttttgggggtagttttttaatcgagtagacgtttaggtttggaattttgtaatagaggttatagggttttgattagggtgttttgggaggtttagaattagtggtagtatatagggtagacggtaagtgatttggtatggggaaagaggtaggtgtttaggtcggtatagtatattcgtaaggaataggtagacgggaagtcgttcgtgggtttgtgtgtgtgttcggagttaaaattttgttaatgttttatgttttgggtatatttattttttttttggggagtatttttttttttatttttttttttttcgtttgttttttttatttagggttttttttatttttttcgttttggggatcgagggtattatggttttatgttttattatcgatgagttgtatagggatttagttttttcgttgtttaggtcgggttttttaggtttagggtttttaggaatggagagggtattagtgttttttatggatttaaatttttcgtatttcgtttttgttttttttttaagataggttttcgagttttaaggttttagggttttgtggaggtcgttacgtagtagtaaggagaatgttttgtatttggttgatgagatttttagagttttattttttatttttttattgtataaacgggtttttaggcgattgtagtattcgttattgttcgtaatagggtgataagagggatgattttttttttttttttttttttggttggtggaggtacggggttggcggacggtatgtgttttcgtgaatttaggttaaatttgttatcgtaaatacgattataattcgggtttttgtgtaataaaagtttttttaagtattagttgttggtttgttttgtttagcggtgtttgttgtaattagatttgtatatcgagaaagaatttaaaagtttttgatgtttgttgaaataatttggtttaggatttacgtgtttagattttagagttgtgtggtatttgagtttttttcgagtttttattgtcgttcgaggaggatttttagatttgtgttttggaggtagagtaggttgtgggacgggtttttgggtgggaaggattatgtggatatgtttttttgtttgagagttttaatattttcgggacgtgggagttggcgcgttggtaggatttaggtgttttttttttttttagagaaaaaggtttcgttgtttggtaataggtgtagatttgtttttaattaatgttagtaggttttttgcgtgatgaattttgttttttagttaagatttaaggtattttgtgaatattgtttttttgtagtttgagtttttgtggtgggaggtaggagttatggggagtgggggtaggttttttatacgggttttatagttattggtagtattgatttgatgttttttgagtttagagtttagggttagatagatttattgtttcgattacgagttggtttatttagaggggggcggatatagtatttaggtagtagatgtattgtgattagttttgtagcggggttgtgggttttttgggttggatgttcgggaagaggtaggtggaggtaaacgttaggatatttttgtagtgattgggtgattgtaggttggaaatgttttttgtgggttgtggttgtttaggaaggttttgaatggggttagtggatagagtttgtatttagaggggtagtgttttggaggagtgaggggtatggtagtgtagggatgtttaggtcgtttttattttgttattggaaagttgggcggtttcggtttttttagttttttcgtttgtttttttgtttgtaaagtggggttagaaatagttttttttgagggttgttgggggattttgagatgtagtttatggcgttgagtacgggttttgttttttacgggtgtggtgggtgtcgcggttggtgtggtatttgggcgggaaaagggggtatttgtaaaggataggtaggtttggatgtttaaatatgtagatttggggatgggaggttttaggtaagggtttgtgtgatgttattgtatgaatgaggtcggatagtatggttattattaattatggaaagtacggtagatattagtgttagtagcgttcgtttgggggtttttttgagttcgataggtatttaggtttttagtgtagttatgggatttttttttttttgtttggttgatattttggaggttggcgttatgttggttgtaggttttttttattgggaggttgttttggttttttttgttattatttatttttatttttattttggagtgttatagatgggtggattatatgtttatttgtagggttaagcgttgataatgaggtgagtatttgttggatgatcggattatgaggatagcgggggcgttggtagtttgcgttcggttttgtaggttggtttttttttgaaaagcggttgtggtagagtgtgtattttagggagtggtgtttgttgttttgaatatttttatttagtaggtttttgtaagggtttagttaagtgtggtgtagagttgggttggtagttggaatagttttattttgtttagtggtgagattaagggttgatgggttaaggttgcgtgttgtttgtttagttcgtggatttatttattgagtatttttatatttttatattgggttcggggtgttaggaggtggaggggggattgggtgtttggaaaaataagtttatcgagagtttgagtttttaggggttagtattaggtagttattacggtgttcggtatatagtggttatttggtttcgtcggttgttttggtggtggagagcgtgtatggtggtcgtacgtgatgggtattatttagggtaatatagatatgtagattgtgtatttgtttgtaggagttagggattttttagtttggtaatttgtgatttttgtttattcgttgggagagaggtgttgttttttgatagtttggtgtcgggagagtagaattagggttttttttttttttttttattttttattttttatatgtttaggtattaggggaggttatatttagggatgagttttggttattgggtttagggttttattgttgttattttttttttttgttagttagttaaatgttcgtttattatcgtgtcggggatggggttggtttgtttttttgaagtttttttggtgtatagtttaggttggagtttcggacgatttcgttattttttttttcgattttttttttttattttgatttattttagaaatttagttaaaaattaagtttttgtgtttttttttgataaagttattgaggaaaaatggttaaatattgtttttttttttaaagtttttttggttttttttaaatttggaggttttgagttgtttatgagattaaagggttcggaattttttggaatatagttttagaagtgggaggatttgttatttttttagttaaatagatttattagttggtttttagatatttttaggcgtttggggtatttttgggtttaggttgtttaatttggtttgtagagtttcgaggtttcgtttagattgggttagtagatagttttagagattttaagtttgttgtcgtttttaaaagttttgttaatgtttagaaatttagagggataagaagatgatttcgatgttagtcgggattataaatagtgaggttcgtttttttttttatttatgtttgtttttattgttttcgtagttgggtttttaggggattgttcgtggttatgggggaggtcgggaatgcggggtttagattttattgggtttttcgtatttttttgtttttttttgtttattttttttttcggaaatttttgaatatttttttatagtttttggtattttgttatttttggtatttttgggttaattgggaaagttattatttgtttaatatttagaaaattaaggggtttggttttaaatatattgtagtgtttttttttttatatggtatcgaattttttgtgtttttaaagttaggagtttgtgttttggatgtgggcgatggagttttgtagatatttggagcggtttttttgggagagtttttttcgtttttttatttattcgtttttttttttttgttttaagttttggttatagtttcggaggggttatttgagtgtaggttgtttttaggtgtatagttggaggggggtagttattttatatttttttgtttgttaggggtatttttagggatttaggttttgagggatagcggaagggtggggtggggagtaggtcgttgtttcgtgttatttgggtgttatgtagattttgaatgggtagtttttgggagttggttttttttttttattttttttatagtgttgtttttttgaggggttggagttttttggagttttttgtagtttgtggtaggtttttttgattttgtgtttggtttcgtagtttttaatttatagttagtggtatgaagaatatttttggttgtttttatttgtggtttttgtaggtagtagttttttggggtagggtttgggggttttggtatttttttgtgggattttttgggtatgagggagggagttatttgggttatagatagattttttttttgtatttaggaggtttaggatggatttgttttatttttttttttggtgggaagagagtatttttggttatggggaatgtggtttggatagagttatttagtttttttttttttttaggtagggttttgaaagatggagatggttttgtttttgttaggttaatagttagtagtttggtggatttttatgtagtttaggtaggatttttttttgtttttattttttattttatgtgtaggaagttggttttaagtagggatttttggtttcgttttttacgtgggtgggtagtttttttgcgaggggtaggttaggtttttgttttatgttttttagagatcgatgttatttatagtaagagtatataagtttttttggttttaaattaggtttggaggggtggtttttttttttgttttttgttttttgttttttattaaaggttagggaatggagtgttttgtatgtttgttggggttgggtttttttttttggtttaaaatgaagggttggaatttttggtgtagattgtacggtgagaggtgttttttgggatttattcgaggagtattattgttgaatgttttgttaggttaggagtatcgttgggggtgggagaggtagttggtttatttgtttatttaatagttatttatgggtattttaagggttagttttgttttaggtattgggggtttaggtatgggtttaggagaaggggtagaacgggagggttttttggaggaaggttttttaattagagatcggggtaggagtttgttaggtaggtgatgttggttagttttttttgttattttttttttttttttttttttttttttttttttttttttttgagatagagtttcgtttttgttgtttaggttgtagtgtagtggcgtgatttcggtttattgtatttttcgttttttgggtttaagcgatttttttgttttagttttttgagtagttgagattttaggtacgtattattacgtttagttaattttttgtatttttagtagagataaggttttattttgttggttaggttggttttaaattttttattttaggtgattcgtttattttggttttttaaagtgttgggattataggtgtgagttattgcgttcggtttttttttgttatttttgtagatttatagtgtgtgtggaagattgtatgtttgtgtttggtatagttgttttcggtatttaggtgggaggtgggggagagggttgttggtgttagtataggttatggtatgagataggttttcgtagttaagcggggtgtatcgtagtattggaggggttttgttgcgtacgagatttaggttttgtatttgtttttttttttaggaggtttggagggttgggagggattagggtggtgaaataatttaggtgggagagaggtattgttggagaggtagagggagttgtaggtttgtagtagcgagttttaaattttgggtttttattagaaaattttagaaagggttgttttgtttttttttttaaattataaaagaaatttttggtcgtttgggttttttggggtcgggtgggggaggagattttttattcgtatttttgtaggtttagtattgtgtagagggaggagggtggaggtaaaggcgagggaggagggtggaagtaaaggcggggtttttttttagtttcgttgttttgtttggttgttgtttttagatttttatttttggttcggaaatatggaattttgggatagttggggtagggggtatagaacggagattttggtgagggaggaattttttttttagttttggttgtggttatagtaaggttaggttgggaggattttatttaaatatttatattttttttaatatttaaatgatgaagtaggtttttgtatatagttgttttggagttagttgttgtttgttttatttttttttttttttttttttttttttttttttttttttttttttttttttttttttttttttttttttttttttgtattttttgtttttgatttaagtttaggtttttttagttgttttttttttatttataggtattttttgtgattgagtttttttttgttattttttataattattttttttaattgagtattttttaggtgttaggttttgggttggtattttgtatataaggtgttttttaatttttacgagagtttaataaggtagattgggttgttgaggttttagcgttggaaggtcggttcgggtttttttagttcgtatttgtatttatttattatttttttattgtggagatttgttttttggtttttggttgagtacgatggaaatttttgtttattagtttttggagagtggggatggttgagggtttcgattttggggtttgacgggggttgtttttgttttattttagtttggttgtttttttatttaatgattgagtttgtaaaattagaataatagtgttatttggttggtattttgggtggttgggaggcgtgggagagggtgtacggaggggttgagcgaggtgttagtatcgtggggattttcgagggtagtttttttaggtttagggcggagtgtaggtagagggcgcgatggtttagcgtgtcggtttatatttggttttgtttttgtttatacggtaatgtgggggagttattagttttttagtgttttagttttttatttgtgtaatggggataagagtaaattattgtttttaggtatggtaagtatttatatatattgattattgtagaatgaatatagtgagttttttttaggtttttattatatgttaggtagggtgttaggttttagtggagaggggataatgatgggtaagttggtttttgtttttaagggttgtcgagtagggaggaaggcggcggttgttttgattgtgattcggagtggggtgattcgtaaagaggttggcgggaggttggttgggggttggttgggggttgtttttttttttgtttgtgtttcgtggtagggtattaaattggttttttttatggattttcgaggttttgattgtgggatttcgggtaggttttgggattttgtgattttgttttcgtttgttatttaggtttttgtttttagtagtgtttagtatacggcgatttttgtatgttttttagtgtgtgattgattttggagttgagatttggtagttgaggttggatattgtttttggataattttcggggaggtgggggtagggtggggttgtgagttggtaatttcgagtttttagtagttttcgaatggaggttttttttttgtaggattttcggggaggaaggaggggatgggggagatgaggtttgtgagtttttaggagggtagaggtttatatttgtagcgttttagaaatatttcggggtgtttaggtttatttagtttttttgagttagaattattaagagttggggattagtagtttattttttagtaagatttagaaatgatttttttgaatagttcgagttaagaatgatatatttggaattagaatattagaattatagaggaatcgagagaacgggtttaaaatgtgtagggattttagttatatggcgttatatggaggaaagtatttaatattattattgtatgaatttgtttaaatatatatatatatatatatatatatatatatatatatatatatattttttagtaaagagtggaaagatatttgttagaatattgatggaagttatttgggttgtgggtttatagattttttttttttgtttttgtgtattttgtaaattttcggttttgtgtttaaattttttttatagttaggaataaagtaatagatgttattttttaaagtttatgggttcgtgttcgtaattttaatattttgggaggttgaggtaggaggattttttaagtttaggagtttgagattagtttgggtaatatagggagatttttatttttttttttttttttttttgatagagttttattgtgttttaggttgaagtggcggtggtacgtttttggtttattgtaatttttgttttttaggtttaggtgatttttatgttttagttttttgagtagttggattatagatatttatatttgtaggatttgagaattttataagaggaaagtttttattcggaggttgttggggatttggagttgttagtttatatattttttagtagagatagggttttattatgttgattaggttggttttaaatttttgtttttaagtgatttatttatttcggttttttaaggttttaggattataggcgtgagttattgcgttcggttatgggagatttttttttaaaataagaataaaaataaaaataaataaaagtttattgttaaaaagaaaaatatattatttaatttaatttttttttaggattgagagatgaggaagtagaggtcggaaagtgttatattttttggtcgttggtagttaggggatttgaggtttgggttggttttttcgtgttttaggtttggggtgttaggtggagtttttgttttgtttaaaggtttaggtgtttttgttagtattgtttgtttttgtatttttggttataaggaatgtgggttaaaggtagggtttttgatttttgtttaggagggtgaagtgggttggttttttttgtttttgttttaaggtttttgcggttgtgtttttggaaattgttggttcgagttagtgtgcggagttgggatagattttatcgtggttttcgtggggttattttatgttcgggttggaagggatttttcggtttagttttttttgttttttattaggaaattgagattagagaggttatttgtttggttcggggtggggtgtagatggcgtttgtgatttttgtatgttacgtgtagatagttttttagttgtgggttttttacgtaagtagttatgttggggataatttggttgaaatttgcgatttaatgaagagaagaatgattttttttgtagttttgtgttttataggtttttttttgtttttattttttttgtagaggggttttatgttggtgggtgggtttttgttgttgtaatgggtttaggtagtttttgggtagtggaggtttggttgtttttttgtttaatgttttttgtagtttacgttgttcgggaagggcggggaagtatttagttattggggattttataagatgggtatttgggagatgttgattggtaggttaggttttcgtggtttataggtaggttagaggttatagtgttgagttgggttgagttggtagtttagggtagtgggggtgggggtattttgtttagttatgggtttttttggtataagggtttggagtttattgtaaataatttttttagttttttttttttttataggttattagtagaattgaggggttttttgttgatgaggtgtggtttgggaggggttagttgtttgtttatttgatttttgcggataggtgattataggttttttgttttagggggttgggggaaagatcggggaggtttttttggtttttttatttggaaggaaaatacgggtataggggagatattttatagggatatattttagttagtattttttggttgtgttgggggtatagtgtttgttttgtttataagaggggttagttttttttaggatttaattttagtttttagtgtagggtagatgagtatttagaggtttagaggatttatattacgagagagaagttgtgattatataggtattgaaggttaagtagaagagtgggatatacgggtgatttgaaagttttagggttagtgtggttagttttagatagttggggagttttgggtattaggtttagtaggggaggagggttttcgtgatagtttgttggggttgttgtaataaagttttacgaattttgggggttgaagatggttttagaggttagaagtttaaaattaaggtgtcgattaggttgattttttggggtttttgcgggaggtttcggtttaggttttttttttagtttttggtggttttcgggtgtttttgggtatgtagatgcgttacgttattttttgtttcgtttttatatggttttttttttgtgtttttgtgtttcgtaaggatgtttgttattgtatttagagtttattttaaatttaggatattttttttttgagattttttattgtatttgtaaagattttattttaatttttgttatatttataggttcgagggttagggttttggtatgttttttgggggttattatttagtttattgcggtagttgattttaggggaagtagaatgttttaagtttggggtgagcggagggaacgttgttgggtggggagtgggagattaggttcggagatatcgcggattttttttgtttgatgagggcgtgatgaggtttttattttaggttttttgaatggcggttgtttttgaggagatttttttttttggatttgtttttttagaaatttttatttaggtttaggttttaaggtggatggtaagaggcggttgtttttgttatatttgatgggtgagtgtgtgaacggggttgggagtaggatatttgttatttttgtggatagattttagaggtttatgaatttgttgttggggaaggtgtttgatttagtttgattttttatttttattttttttttttcgtttttttttattagttttgtttttagagttttatttttttaaaggtaggcgtcgttttttggattttttagtagttattttttattttagattttttttttgtaggtttttttggttttagcgtttatttttttttgggtttttgtttttttatcgtgaggtttttgggtagaagtgtggggttttttcgttgtgtttggttttcgcggtatattaggggtttttttaggggttcgttttgttcgttaggtttttagggagttttttaagtttttagatgggtttgatggagttttttaatgcgttgttttagagtaggaggggtttcggttgagttcgagagtttttttagttatattttgggttgtttggggtagttaggtagttcgttttttggaggtgttgtttttttttggttattttttttggaattttttgcgtttagttgcggttttttttatatagtatatttattatttttttttatttgtgatttttttttgttaatttttttatgtttttgagaatggagattaggttttttttattttggagtttagtagaatttaaattaggtagattcgtgtaggtttacgtgggggttttgtggttattgtggttttgtcgttatttttagtttagtttggcgcgttttggattatgttatttagtgtcggttttttaaattttttttttggttttgtaggtttgggaagtagttggtttttgggtgtagttgtgatcggagtttgaattttgttttttggggttatcgttttttgtaattaggttgtagtttatattggttcgggtagaggttatcggttgttcgttttggggttataatatagagagtttcgtgattaatggaggttttatttgggttaagtggtttttggtgttaggcgtttttttttttttttttttttttttgtattttttaagtgtttgtaatattttttttaatggataatgagacgaggagggagggaggggtggtttttttgtttaggtagattaggaatggttatcgtttgtgtgtgtagtgataggtttgggaatagataagggagagtttgttcgggaggttggatttttatatcgatgttgtttgtgtttggtagttttgtttcgggttttagaatagatattgattaatacgttttttagggtttttaggttcgggttttggttttcggtagagttttttatttatgggaagaagtatcgagtagttttgttggtttttcgtagggagttgggatgtatttttaagagtagtatgcgtgaagttcggggtttgggtaaaggagtgtttggggaagagtttgttgttgttggagggtcggaagtagaggggaaggaggggtacgcggtaggttgaggaggtggttggcgattttgtggtggggacgagggggttatgagtagattaggagttagtattacgtttttttgtttttagaatcgaggacggagagttgttagagaggttttggcggggtgtttggggttatttaaagggcgtgggtggattaaagttgaggaaagttttattttgggggatttcgtatttaatttttgaggtttttagagttgtagtttgtggtttttcgaagttaattattttttagggtttcgtttttgtttttagcgatagttatttattagggagtttttgatttaaggagatttgaaaggttatttggttttttttttatttttaggtaggttatatttagatttttttatatagattcgttttatttttttgttgttttttattagggacggagggtgggcggtttttttatttaggttttggcggttttattttagttaggaaattttttttttttatttgttttatatttttttttttgcggttttcgtttatttttttttaatttgtttttagtggagtagttagtagttggtttagaattcgggggtggggggagcgttagattagtgtagtatatttgagagtgtgttagaggtgtttttatttttatagttgatttagtaaagaaaagaggaagtttagtaatttagcgttattttaaagttcgtttggaatgattttgtggttgtcggaattaggggtacgcggtagatgacgggagtaggtatagagaggttttcgtttcggattagtcgttgttgtttttttggaggttgggttgttttttaagaagaggatttaaggttttgtgagcggtggttttttttggagtttttattgtggttttggttttgttttgcgtaaagagagatggtttgaagtagaagttgttacgtggttgttttaggtaggcgttcgtagttttagttattcgggaggcggaggtaggagaatggtatgaattcgggaggcggagtttgtagtgagtagagatggtattattgtatcgtagtttgggcgatagagtaagatttcgttttaaaaaaaaaaaaaaaaaaaaggagtagagaaattttttttagaaggtttgtagttattttttttttatgttttagaggtaaaaaaaaaaaaaattgtatatttcgttttttttttttttttttgagacggagtttcgttttgtcgtttaggttggagtgtagtggcgcgatttcggttcgttgtaagtttcgtttttcgggtttacgttatttttttgttttagtttttcgagtagttgggattataggcgttcgttattacgttcggttaattttttgtgtttttagtagagacggggttttattgtgttagttaggatggtttcgattttttgatttcgtgatttgttcgtttttgttttttaaagtgttgggattataggcgtgagtcgtcgcgttcggttatacgtttttgtttttgaataggtggttttttgattttgggtgtggttattttaagattttgttttggtggggtataattttggttttaggtagggcgatcgtataatttattgttttttgggggatacgttagtgaaagggatttttgaatgattacggtgggataatagatgtgagttgggtttgttttaggaaggttggatgtatgggttttttgagttagaggagataatagtagaaagttttgcggttgatgggatcgagtaggagaagggtcggcggaggttggggtaataacgtatttgtttattgtgaagggtttgtgtgagttgatggttgatgagagggtagtggggcgaggttgttttttgttaggttagattagttttaggatatttatattttttttttagaatcggtgatttagtggttagaaggggttttagaattgacgggatattgagggagtcgaatggaatggttggagtggttatagtaggttttaggttttttttcgttttttttttgtgttttgtttttggggtttatattttggggttgttgtaatagagtgttataatttgggggtttataaatatagttttcggcggtttttggagatttttggcgttttttggtttgtagacgtattattattatttttgatttttggtttttgtttttacgtggttttttttttttgtttgtgtgtttttttttttttttgttttttataaagatgtttattattggatttagggtttattaaatttagaatgattttattttgagatttttattttaattatatttgtaaagattcgttttttaaatgtgattatgttcgtaggttttaggagttaggatttaagatatatcgttttgggggatattgttgaatttattatatttaataaatttagagttggtgttaatgttttttgcggatattatagtagattttggaggttttttgtaaaggaattcgtaggatttttttttttttttggagggatgagattgtagttgggttggggaaagttgttggtttaagttggggttggtttagttggtgttggtttgttaggttgttagagagttttatttagggagaaattaatattataaagttgggggataagagaaggtttggaattttaagggttggttgttgaggttagttgtttatttttttgtgttttattttatagggatttaggtttgttagtgtttcgtttttggaaggaatgttgtgggttgttgtgttttataggtagggtggagggtttttttgtagttagcgagttgttttttttgtagcgtgtagagggaaggaggaggtttgtttattttttttggttttagtcgaaaatttaattataggttttggtattaggtagatttgtttatttttatattattattgtagagtgagttaggttttttgggtggggttgtgatgagtaggaaggattttcggagtgtttgggattttttgggtttagggttgttagaggtagagagaaagaagtttttttttaatatttgagtaaagatagttattagaatttattagagtggttttttgtggtttttttttgggtgttgatttttttggtgtatttgaagtttttagggatattattgacgttttttgtatttttatttaggggttagtggaaatggttttttttttttttgtttagaggtattgtggatgatgattttaggttttagattttagttattgggttacgtgtgtagataagtttgggtagttagtaatttttggttattaagttggttttttgcggattgggtcggtattggaggcgggttttagttgttagtattgtggtttagttaggtttggttttgggaaggtagagggggaggggattgggaaagggattgagttgggggtggggtggtattttggttttttttttttagatttttggtaggtttgaattatttggttgcggttttttaaggagggagcgtttttttcgttttgatgtggattttgttttttgtttacgttgtttttgtttttaaataaatgtggttttttgtggggagtttgggggtcgttttttattgatattgttgttttttggtttttttttgtaggtttcgtttagttttattgcgtttatttttaagtttttttttttggacggttttgttttttgagaatatatttttttttattattttaattgtgtttttttttttattcggagtttgttttatttgttttaggagttattttttttttttattaagtagtttaggttaattttggagggttaatttgtgtttttttagaagtaggttttgagatagggattttagtgggaggggatattaggggatgtttgagtgtgggaatgggttaggtagggaatttagttaataaagggtgttttattagtttattgtgattataggtggttgtttagtttttatatcgggtagtatggggagattgtagatcgtgtttttagttttgttttatttggggttgggtaagggagttggggtttttatattttagtttttggttaaggattgtattgtttattttttttagtttttcgagggtttgggtattaggaaaggttttgggtggagatacggaaataggttatgtgaagttagtgggcgtgattggtagtagtaaggttaggatagttttggttattagtaaggtgattatatattttagtatgtatagtttttatagatatatatttaggagatggtaattatattagtaatagttatttttgtcgcgtgttatgtttgtatttagggaattttattttttatttatttatttatttttatttgagatggagttgcgtttttgttgtttaggatagagtgtaatggtataatttcggtttattataattttcgttttttgggtttaagttattttgttttagtttttcgagtagttgggattataggtatgtattattacgtttgattatttttgtatttttagtagagatggggtttttttattttggttaggttggtttcgaatttttgattttaggtgatttatttattttagttttttaaagtgttaggattataggtatgagttatcgcgtttggttttaggggtattttattattttattattttttatagtaggtgatattgaggatattgaggtttagagtagattgtggttatgttatttttttgtttggtttttttgtttttagttttgaaataaagagtacggtttttgtgtaggtttatacgttttgtttttagttttggagtagtttttaagttttttgaaggtatattaggtttttgggtttcgttttttaagttttggataaataggaggtgaaggagtttttgtaattggattttattttgttagcgttaaggttttgtttgattatttattttattttatatagattagggatttgtgttaaggtttagtgttataggagagtgaagataaggaggtgtttatggcgtatatgttgttggatttattttgtagattttaagggttatggggagttatttgttaggtgaggttttttcgtggtttttttttgtaggtttagggtagtatatagggaggtgtttttttattttttggtattatttgttcggtttttttgagttttgattttggtttttagatagttagtgtttttttagggatagaatttgttttgttgttgtttagaggagatttagtttgattagggttagcgtttttggaatttgagtttggaattttattttgttttgggtagaggttacgttgtttttttttacgagagttgagttgcgtatgagattattttgattttgggttttattatttttttgtatgatatttgttttaggttggagtagggttttgtggttcgtttggtgttttttttttagattgaggtttgatatgtatattaggaagtgtttgatttggttttaggagttgggagcggtttgttaggtagtttgtggttagagtaggggttttaataatggttttttgtgcggtatatttttttttaaataggtttaggtttaggttgtttttgtttcgatttcgttatgggtttggaggggaaagtttgtatttggagggtggtttattgtggtttttttttgtgtagtagttgagatcgtaggtgtttgagaataggagaagttttgtgtttattttgggttgtgagatgtttttttagaggtggggatggggatgggttagtatgtagttatttatattttttagtttgttggtattaaggtttgtgtatgtgtgtgtttttttttttttaattttgtttttttaatatggagttttgttatttgtttaggttggtttcggatttttggtttaagcgattttttagttttaggtttttaaagtgttgggattataggtgtgagttattatgtttagttagtattaaggtgtgttttttaagagtaatattggtcgggtgtagtggtttacgtttgtaatcgtagtattttgggaggtcgaggtaggcggattatgaggttagtagattgagattattttggttaatacggtgaaatcgtgtttttattaaaaatataaaaaaattagttagacgtggtggtcgggtatttgtagttttagttattcgggaggttgaggtaggagaatggcgtgaatttgggaggtggagtttgcggtgagtcgagattgcgttattgtattttagtttgggcgatagagcgagattgttttaaaaaaaaaaaaaaaaaagaataatatcgatggttttattttttgaatatgttaagtgatttttatgtagtataagtattttagaaggtaggaaaatgtaatgaataatatttatcgttatttattttatttagagatcgttattttttgttcgggtgtgagtgtgtgtgtgcgtgtaaattgtatatgtgtgtatgaaatggaattaggatttttgtatatattttgtgttttgttatttttatttaatattttcggtattttttatttttaaaaatgtgattttaatgatggtgtaggtttttgatatatgggtttagaaaatttgcggaaattcggattgtttttaggttttgttagtttaatgttgatgtaaatgttttcgtacgtaaatttttttgtatttttgattatttttttgggataaatttttagaagtgggttaaagtatatgaacggtttttaggtttttggagtaagttgagatcggtggggattggagaagggatttagggaggtttttgggagtttgcgagattggagtttggttttaggggatttgaatttatagatgaaggagatggttggtaaaggtgggaattttttgttttatgggtgggggggtgatattgttttattttttagtgatagtatggggatttttttaatatgatttggtttcgtatttttttgatattgtgtacggtttatagttgtgatgtttagttgggagttttttttgtgttttttagttgtattaattttttgtagatagaggaggaagttgttcggtgtttttttttgttgcgtgggttttttgaatttgtttagttgggtttgtggatttgtgtagttacgtacggggttttaaaatttgtaaaatgataagtttacgaatattttcgtttttgtgggtgaatgtggatattttttggttgcgtttttttttatagggaagatggagacgtgtaaagtgataaggatttgttatttttgggtaggttatgtcggttttattgtgaggatggtggtagggggttttttaggaggtttgtatattgggaagagaggggcgatcgtgtgtgattgtaggatttagggcgtagttttaggattttgatgggggaggagatgttggggagttttgttttgttagtttggtgatagatattttttaatgtttttcggttgggtataatttataatgtttttcgtggggaggtaattgtttatgaggtatttttggtagggatgattttgttttattgttatatattttagtaatgaaataagaatttagagtgatgtgattttttcgatgatttttttaattatttggggtttttgtgcgattttaagaagggggaaggaggtagttttcgtttttttgggtttttgatgtggtagttttggaatggttacgtgttcgttggtttatagtgggttatttgtcgaatgtggttgtggtgggattggggttgggttggagagtgggtgattatattagttagttttattttgggttattgtgtagttaggggttttatttttttaggggtttcgttgtgagtgttttggggttgttggaataaattattggaaattaagtggtttaataaagattgattcgtttatggttttggaggttataagtttgatattaaggtattggtaggattatatttttttcgatagttcgaggggaggatttttttttgttttttttagtttgcgttggtttaggcgttttttggttttggtagtatttgtagtttttgtttttattacgtagttttttttatcgtgtttttttgtgttttaagtttttttttgttttttttttataaggatatcgagtattggatttagagtttattttaaatttaggatagttttatttcgggatttttaattatatttgtaaagattttttttttaaataaggttatattcgtgggtttttggggttaggtattagatatgtttttttgggggttattagttaattttttatagaattttagacgaaagtgaatttttataggttgaaatgggggtgaaggtttagtgcgttttttttttttgggagtttttttagggtttgtgtttattttgtgattttgtgatttagttttttttttgagatgaagttttgttttgtcgtttaggttggagtattgtggtacgatttgggtttattgtaatttttgtttttcgaatttaagtgatttttttgttttagttttttaagtagttgggattataggcgtttatttttatgtttagttaattttttgtgtttttagtagagatagggttttattatgttggttaggttggtttcgaatttttgattttaggtgattcgtttgttttgggtttgttttggttttttaaagtgttgggattataggtatgagttattacgtttggtatttagtaggttttggttgttttttttttttgagatagagttttattttgttatttaggttggagtgtagtggtgtgattatggtttattgtagttttgattttttggttttaagtgatttttttattttagtttttcgagtagttgggattataggtatatgttattatttttggttaatttttgtattgtttagtggagtcggggttttgttatgttgtttaggtttgttttgaatttttgggtttaagcgatttgtttattttggttttttaaagtgttggggttataggcgtgagttattacgtttggtttagtaggttttttagaagcgtttgaggtttggtgaaggtatggtgttatggagtagagaatatttaattttgttttcggggagtcggaatatatttttcgtagttaattttaatagttatgacgtggttaggatgatatggggagggggtggtgtggattgtgtgggaggttagtttttcgggaagggggttggagtgggtttggttttgaggaggatttttaagaggaggaggaggcggtggtatgttcgtttggggggatggcgtgagttagggtgggtatttttttatttaggtgttatttttttgatattttagtcgggatatggtttttttggggaagatggatatttttagagtggggtattttttggggaagatggatattttcggaatggggcgttttttgtttttattgtttttttagtatatagttgtatttttttgtagttttggaggttgtgagattttttggttgttatttagaataaattcgtttttgagtagcgtcgttttgatggtggggtggtttttgcgggtggaatagtttttgttgttttagagtttattgagagttagtgggtatgggagtggtgttggatcgaaatatttagagggattatagagttaggtagtaagtatagaggttagttagtggggagggagggatttatttatgaaaagatattaagtattgaaagagaggagaggatggttggggatcggtatatatgtgtattttgcgtagatggttaaggtggtgaggcgttagttacgtagataattggaggaaggaggagtgttttaggggaggggttagtttcggttttagaatgattcgtttgtgtacgtgggtttggttggaataaattattgtattcgtatcgtagatttaatcgtaagtttatattagggtagtttttgttttggtgtagtgttttcgattatgagttggttatggtgggggtgattttaaggggatttttaaggagggggtttatcggattttttagggaaggttatttgtttttttgggttggatttgggataaggtttttttttgtttagtttttgttttttaatttgatcgtacggaaggatgttgaggatatttggaagtcggtttttgttttatagtatttataggatagaggtatattatgtggggatagtttggatagtgtttaggaggtagggagtagattagaggatcgcgggaggttttgggaatcgtacgaggatttaggtattgagttttgtattttttggtattagttcgatgtatagtttggttttgtgtttatttcgtattttattttttttatttgtacgggggcggtaataatattttttatagtttaggtttaagcgggtgtagatgtgatgagtttggtaagtttattttattatatttagttttgggtattgaattttggattttttggttggtagaagtggatatttaatttttttttggggttttggggtttttgtagaattagaatatagttagtagtttgtatgtagggtgtagagggatagagggatattatgtcgggagtttatatttggtatatttttgattttggggtttagtgttttgttgttttgcggttacgtgattagttagaggttatggttggatttataggcgaatatagtttgtggatttgattttgtttggttttgcggtgttttattttatttttagttttagtttgtggagatagagtttcgttttgttagttaggttgagtgtagtgatacgattttagttttgtaatttttgtttttcgggtttaagcgatttttttgttttagttttttgagtagttgggattataggcgagtgttattatgtttagttaattttttatttttagtaaagatggggttttattatattagttaggttgtttagtgttttaaaaagggtttgttttgttttgtgttagtatttaaagattaggagatattatataaagatttagatttttatttttttgagaagtgaatagttttggttacgtcgggtttatattttttagggtagtgacggagttgagatagggtttgtgataattgagagttttttggagtttatacggttttttgtttagtttttggtggaggttgagtttagtgatttaggatttcgtttgtgtttattaagaaggagaggtgtttgtggtttagagagggcgtttataggagtgttttgtttaggaagttggtagttgaggcggttagggttagggggttgggttttttttttttttttttagtgtttgagtgtatttggaggaagagagacgggtgaggggaaggtattgaaattggttttggagcgttattattgggggttggggattagttgttatttttttttttgtgggtaggggaggtagtggtgggattttatgagattcggattttgtggtttggtgaggtagggagcggttggggagatattgtgggtttttataggggtgcgttgtgggtttggtttggggaaggagttggtgaatgtgtttgttatgtgggtttttttttgttttggttttgataattaggagcggttggtttttatttggagtgcggttgtggggattgtggaggtggtagttttttaggtattatttttattgttttcgagggagtagattttggtggagaggtaggatggttgtagggcgggagttggtggttggtattattgtacgggtttgtagtagtggatgggaagatgtaggagaggttgatgattgagaaagttggtttttgtggattaagttgggggagtcggataattaagtggttagaattttgggttttggtattagtttgatgtatagtttggttttgtgtttatttcgtgttttattttttttatttgtattgggggtattggtattttttatattttagggttaagcggttgtagatgtgatgagttcggtaggttcggcgtttcgtcggtattgaaagttttagtgttcgtttttagtgttattgatggggttttgtttttgttgcggttttgattggttatagttgcggttatttattattggaggtatgtttttcgttgtggttgatggtagaggtgtgtttgttggtggtgttttagtgtgtgttttggttggaggtgaggagggataaaaatagtcgcgataagaaggaaattaaggtcgggtacggtggcgtacgtttgtaattttagtattttgggaggtcgaggcgggtggatcgtttgaggttaggagttcgagattagattgattaatatggtgaaattttatttttattaaaaatataaaaattagttaggtatggtggttcgtgtttataattttagttattggggaggttgaggtaggagaatcgtttgaattcgggaggtgtcgttgtattttagttagggtaatagagtaagattttattttaaaaaaaaaaagaaggaaataaaagttttttttggaattagaacgtttttatgtagacgtagttggagggggaggttgtgtggtttgcgtcgtggttatggtaagatacgacgggtagtatttttttattttagtttgtatttttgttttagaatttatgatggtttttttaggatggggttgtttttttcgtttgttgagatatgaaggacgggaagagattttcggtttttatcgtcgtatcgtttgtttttttttgttgttttttagtaggaaatatgtcggagtgttttttagttatttatttattaattgtattttttttttttattttttagttttgaaaagattttttgaggtcgaggaggtcgagatatttaattttattttatttcggagggtttagatttttttatttcgagttattgtggttagttttatttagaaattttaggatttgggcgtgaagaatttagaattttcggttcgttatgtggattttttaagttaacgtttttttaaggcgtttttgcggagggtggagttttcgggttttaaggcggtcgagtcggtgtttcggcgtattgagttgtttattgatatttcgtttaagtaggtggagaacgtcggggttatcggttcgtttcggttcgggtttaagagggtcgaggtgttgggttataagacgttagaatcggtttttcggaggacggagattattatcgttaaattttaggagttagtttatcggaggatggagttttttgtttttaaggttttcgaggtgtttattgtttttgttatcgacgtagtttttaagagggtggagatttagatgtttaagtttgttgaggcgtttatcgtttttagtttagtttagattttggagaatttagagtttgtttttgtgttttagttgtagagtaggttggagtttaagttttagttttttgtggttgaggttatatttcggagttaggagggtgagtcgtagagcgttaggttttggatgttgtggtaatggggggtttggttgttggttttgttatagaattttggaggaagaagttggatatggggtggagggtgttattttggagatttagaaagatcggaatgtatgggggtgggggtttgtaagtttaggagaggtggttttttttgtttgatgggaatatgttaagatgttttaagcgggatttgaatgagagtttggaaagattttttgggttttaaggagttttttttatgggttatcgtgggttttgttgggatttttgtttgttgtgtgtttttggagggtttgggaggtttagagaatgaggagttacgtaggaattagggtaggtttatgtaggggtgtaggatagggtggagttgagatttttagaagggttgttatattttggtggtttttgtttgaggaattgtaggttgtttggatatgtttagtagaggtcgagggtttggggaagggaggagggacgtatgttttttgaggtttgtattggagtttatggtttggttttttttttttaggagggatggttgtggtagagggaggggaatatgaggagtattttagtttgtaggataaaatttttagggtattgggaaggggtgtttggattagggggttgtgtgatagttgtatacggttttatttgggggtgtttttttggcgagaggagagaggttatggggttttagtagcgttttgggagggtttaagtttatagtcgtgttgatatggagtttataggtaggggattggtgttagttttgtgggatatagggtttgtttggaaatgttaggttgtgggatatggttgggtttttttttagaagcgtgttttttggttttagtagggatcgtggttttatggggttatagtaaggtgttagttgggttagaagttttttaagagttaggtttgattttgggtataggattagaatttagtaatgtttagtaagttttttttaggttggataaatagtatagtttgggtttttgatttagttgttgttttttatttttaatcgtggtgaaatatataatatataatgtgtaattttagttattttgtagtgtacgttttagcggtatttagtatatttacggtgttgcgtagttgttatcgttgtttattttcggtattttttttatttttttaaattgagtttcgttttcgttagattaagttttttatgttttttttttagttgttggtagttattattttattttttgtttttattatgaatttatttgattattttaggaattttgtgtgtgtggaaaaatataataattgtttattttgtgtttggtttattttatttagtatgacgttttaaaggtttattcgtcgtgttgtagtatggggtagaatttttttttttttagaggttgaataatattttgttgtgcgatgtatttgtgttgtgtagttgtttttttatcggtggatttttgggttgtttttatatttttttaagtttttttttttattttttttgatttttttttgatttttttgagatagggttttgttttgttttttaggttggcgtgtagtggtgtgattattgtttattgtaatttttgttttttgggtttaagtgattttttagttttagttttttaagtatttaggattataggttgcgcgttattatgtttggttaatttttaaattttttttgtagagataggtttttattaggttgtttaggttggttttaaatttttgggtttaaatgagttttttgtttcggttttttaaagtgttgggattataggtatgagttatttaatttttttttggtttttttttttgaatgagagttttttagtggttagtgggtttgggggttgggaggatgtggggtttggagagggtgtgggtttggggggagattagtgttttttatgtttttatgggtatgtggagtgtatatttgttttggcgggtttggggtttgggattttgtattttttatagagggggtatcggaatatattgagtagttagaggttagtgggttttggaaggtttttttcggtttttagtgtgcgagtttcgtgtttttttttttatttttttaagtttgattttgaagagttattttgttttagttatttagatttagtgatagtggttgttggtggtatggtgttaggttaaaggtatgggtagtttgtagagtggtaggaggttgtttttttttttgttttttgttggtgtaggatttttgtttgacgtgtcggatatatttttattttgggttgatgtgtttatatttagttgagttaaataggatgtggttggggaggcggttgttatcgagttatttaaatttcggtgatggttggtgttggatgtatagggacgtggttttggttttgggggataggtagggggatgtttatggggatgtataagaatatttttttttaggggtagatatagtttagtttttaaattgtgttagagattgtgtcgggagttaggtttagggatataatttgcgggttttgttttttggagtttatcgagtcgtgagtaggatggttgggatataaggagtgtttagggagtttttttagtagtggaagtataattttattaggttaggaaggggagagaaaggtaggttacgtggaggtagtagcgtttagagttgttaggaatttggcgttttggggggacggtggttttttttatggaataggatgtatacgttggagtcggggtatgggagaaaattattagtattttagattcggttatttacggatagggatttgtgtaggtgggagtttagtttacgtggagaggttcgtgggttgggttgatagttttgagggtttaagtaagtttaggtggaggaaatgtagggatagacgagggtagggtttttttaatggaggagtgtttttgaaattcgatgggagtggtttttcggggggtttaggtttgagttttattagtttttttttcgaggtattatttgtttgttttttcgttttttttttttgtgttacgatcgttttggatacggatttagttttttttaatttagttttttgtttattttttttttaggtttatttttttttgtttttttatgtggggttgggttgggagttttttgagtttcgatatgtatagttttgattaatttttgcggtttttttgtttttcgagtattagggatttagttggtattatggggaaaggaattatggagggagtttcgtgttttttgagtagacgtttagttttttggtttttgtttgcgggagggtatttgtgttgtggtttgtttttattttagagttgtgggtgtagggtagggttttttggggttttagttgaattgtttttagattgatttttttaaagtatagtattgttgagattttttttcgtgttgagttttttttgtttatttattataggtttttttacggttgatttatttttttgtttagtttatattttttttttttttagttttttttgttttggtttttttttggttttttatatttttttttataatttttttgttttgattttttgaattttgatttttgtttttttttatattattgttttggtgaatttttatgtattttttaaaatttggtttaaatatttcgtgtttggtttgggatataaatgatttgtgtataaatttttttttttttgttagatttttttttttaaatgtgaaagtagttttttagattataaaaagtaatcgagtattttttttttaaaatgtaggaagtatagaaatgagaaagaatttaaaatttatttgtaagttagcgatatttatgtttgaggttttgttgtatagtttttaaaattttttttatgtttttattagattttgagggtagggttgttgtttttgtttttttttgtgttttttttttgttttttgttttttgagatggagtttttttttattatttaggttggagtgtagtggtatgattttagtttattgtaatttttgttttttaggtttaagcgatttttttgttttagtttttcgagtagttgggattataggcgtgggttattacgtttggttaatttttgtatttttagtagagacggggttttattatataggttaggttggtttcgaatttttgatttcgtgatttatttattttagtttttttgattttttaaagtgttgggattatgttatcgtgtttagtttgttttggtttttataaagaattttataaggggttaggtgtagtggtttatgtttgtaaatttagtattttggaggtcgaagtaggtagattgtttgagtttaggagtttgggattagtttgggtaatatagagaaattttatttttataaaaaatataaaaaattagttaggtatgatagtatgcgtttgtagttttagttattggggaggttgaggtgggaggattatttaagtatgggaggttgaggttgcggtgagttgagattgtgttattgtattttagtttaggagatagagtgagattttgttttaaaaaaaaaaaaaaaaaaaaaaaaaattttataagatattaagtaagtgatttggatataataggtgtgttatgaaattatgttgaaggagtgagttattggtggtgagttgggatggtttttttgtggtttttgtaggtagatgtagtgatttttatgggtcgtttttagagattaagtagaaatttttttggttaattttatttttaggatatttggttttttttttggaggttgtgttggagggtttagtgggtgggtgttggttttagtgtgggggttttggaaggagttagtattttaggagggagtgtgggtatttagatggttgaaggggagggagaggaagagaggcgttgtagagggtagaggtatttttgtttgttttttcgttttagggtttggtgaggtttgagttttatgttggtggggtggattttcggttttcgaggttttggttttgtttttggatttggtattttttttgttgtttttttatagaagggcgtttattttttggggttatttttggtttttttaggttttgggtggggacggttttgtttttttttttggatttttgttttttttttgttttttaatatgggtgtttttgggtggagtggggtggggttgggttgtagtatttagtattgagtttgtaagggttggttgttggtttagagttttttttattagagttattttttttcggttttttagttatattagttaagtttttttagagttgttttataaggcgggtgtttagcgttcgtttatgggtttggttttttgtttttttgggatgtttattgggggtaagagggaggttaggtttagtgtttagtttagttttgggtatgttttagttttgttttatgagttaattggttttgaattattattttattttttttagttttaattttttgatttgttaaagaggtatttgtagaggtggttgggggttgagtttttatgtatttatttattttaagaattaagaagggagtttatagtggttttggggttatttgtgaatatggatgtgaaattggggcggggtagatatggtagtatgttttagtagtttttttgtgatttagagggtttggaaatttttgttatgtgggtggagcgttgagggagtagggggttaggttttttcgagttgatgatggtgggcgtggtttttcgtatatttggttcgtatcgggtcgtgtgttttaggggtagaatagggaggaattttagtatagatagtagggttgttagtatagcgttgagtatagggttaattaaagtatagggttttttggaattatttaatatagagtagtgaagaggtggttttggggaaagtggggttagagttgagtttgagtggggggtggggagggcgggtattagtttgtaagggagggatatttattgggttttagaagtttttggtggggattagggattgtgaagttggggagagggtgattattgtgatttagggaggaagggttttatagatagtttagtttttggtttcgtgtttataggatattttatataggttttgagtttatttttggattgtggattttttgaggtagggtgtgtaggttcgtttagtattaggtgtaaggtagggggttttggtaagcgtcgagggatttattggtgtttgatgaagtagtgagtttggatcgtgttatgtttcgggttttgagtttgtaggatttttttgtggggttgtgtgtttttgtttttggaggtgtttagaaggtattgacgtttttgtcgggatgttttattcggaaggtttcgttgtttttatttttttttatttttttgagttgtttgtagagggtatttaggtttttttttattttgggattgggtttttttttttttttttttttaagaataagtatttttttttttcgaattgtttttggagttttttagatttaggtttagagtgggaagtttcgtatgtgttgggggaataggaattaatgcgggaggattggttaggttcggtgtgtttttttcgtggtgggacggggtggggttagagaatagagtttggttttagagtttaggaagagaattttttttttcgtcggtttgttaagtatcgtgtagtggtgagaggaaaggagggttggttcgggaatgtagcgggtgtcgagtagttgtggaatattttaaatagagcgtagttgcggggaagggtggggttaggaggtaggcgttgggggcggtttttttgtttcgttttttgtagttttgtggttttgattatttagtttggttttaggatggagtttcggtttttagatatatggtattgggtgaggtcgttttttagtatttgttttaggaagttagagtagttgttagaagagagaggagttgtgtttgtattcgtcgttttttaggttcgggatagttgtcgggattgagggtttgtataatggcgagtttgttcggaggggcgcgtcgcggttagatagttatgttttgtgcggtgtggatagagggtatatttagttttggaggagcgtatttagatttttcgtttcggggtttaaagtgtgggtagtttttaattagattttggattttagtagatagtttgggaggatgttatgtggtttattttgatatattgttttatttgtgattttatttttgagagttgtagggaggcgtttttttagttggattttatttttttttcggggttttttgtgggtgttataagtgattttgttttttttagtttaaggggggtttttggggtatgggttgtaattgataggttagagtagtttatggttagggttgagtttttttttcgttttttttgaatattgggtttaggaaggggttaaagtggagatgttttgattaaagttgagggaggtatggagtttttttgattttgtttttttattttattgttgttattgggtgtattttgtggagttttaggatttttaaagaatttagagtggagattttcggttttatttagtgtaggtgagggggaaagtgatttgtttatagttatatggttattattagtatatttgggttaagttcgattttattttacggtttttgtttgaaatttggaattggaaatggttttggaaattattgattttatttgtcgttttttaaaatggttcgtagaggttaagatatagatttttgtaatgttttgtttattcgtgtgtggggaaatggtagaggagtatcggttttgtttttatattgtttgggttgtcgtttttgttttgtttagtggtttttttttttggttcgtttttttattgtggaagtgggtataattttttttgtgtagcgtggttagagtggatagtgatgattcgtgaagtagggtggagcgtttgggggattcgtgttaaataagtatataaataaaagttaatataatttttatttaattagtaagtaggttttgtttgaagtttttgggtagtattttatgttatttttaggttttaggtcggtggtgtcgtttcgtgttttttttattcgtaagttggtgtttagaagttttgttttgtgttttggtttttattttttttgtgatttttttttttttttattttaaaaagtaatgtacgacggggcgtggtggcgggtatttgtagttttagttgtttgggaggttgaggtaggagaattatttgaatttaggaggcggaggttgtagtgagttgagattgtgttagtgtagtttagtttgggtaatagaataagatttttatttgggaaaaaaaaaaaaaagcgatgtttagttatttttagatagaaaatgaagattatatgaaatttggaaagaagttttttttttttattttttaatttttttttaaggggtggttatgttgatagttgggtgtggtatttttttgaattttatttttgtagagttatttagggtttgtgtaaaaaaagttaatgtgtaaatatagattttttaagaatataaaggaaattagatttttgttattagtttttattttttttatttaataatattgttgttatttgtagatgtagtacgtttttttttttttttttttttttttttttttgatagagcgtggtttaggttggagtgtagtggtgcgattttagtttattgtggtttattgtaatttttatttttcgtttttcgtttttaagcgatttttttgttttagttttttaagtagttgaaattataggtgtttgttattatatttggttaatttttgtatttttagtagagacggggttttattatgttggttaggttgtttttgaatttttgattttgagattcgtttatttcggttttttaaagtagtacgttttttttaatggttgtgttattagttgttttatggttttgttaggtttgtttagttttttattgtgattgagaggttgtaatagatgttttcgtatttgtatatgtgtatatatgattgaaggatgagtttttagtgaatttttgtgttaaggatgtgtgtatttaagttttgatttgttgggtatagtggtttatatttgtaattttagtattttgggaggttaaggcgggttgattatttgaggttaggagtttaagattagtttggttaatatggtgaaattttatttttattaaaaatataaaaattagttgggtatggtggtttgtgtttgtagttttagttatttaggaggttaaggtaggagatttgtttgaatttagtaggtagaggttgtagtgagttaagatcgtgttattgtattttagtttgggtgatagagcgagattttttattaaaaaaaaaaaaaaaaaaaaaaaattgatttttgtttttgaattggtttttaaagtggttattagaattttttaggattttttttttcgtcgatttgtttagttgtttgttgggttttgtgtagtgatggtttagtagggaggttttatgttttttatttttggttgagggttaaatgttttttaattggtgttttattttgtgtatttcggttaagcgagagggattattttttcgtatgttataggttagggttttgtgttttttttttatttggaaggtgtattttttttttgttgaaattttttaaaaagagttttttgtaagttaggcgtgatggttaatatttataattttagtattttgggaggttgaagtgggcggattgtttgagtttaggagttcgagattagtttaggtaatatggtaaaatcgtatttttgtaaaaattagttgggtgaggtggtgcgtttgtagtttcggttattcgggaggttgatgtgggaggattatttgagtttgggagtttgaggttgttgtgagttgtggttatattattgtattttagtttgggtgatagagtgagattttgtttaaaaaaaaaaaagagttatttgtatatttttattatagtaggtacgagtattttgtttttagttgtttatttttgattttgtttttgggatgtttttttatatagaatattttaattttgatattgttaagtttttgtttttttttttagtttttggaatttatattttgtttagaggttttttgcgttttgaaattataggaaagaattttatttacgtttttttttagtatttttgtggttttatttttatatgttgaaattatgaatttattggaatgtattttggttttagtagcgaggtaggggtagatggtattgtttggatatatagtagcgagtttggtttggagcgggtggggcgtgtgtgtgtgtgtgtgtgtgtgtgtgtgtgtgtgttatttttattagttttggtgtttgtattgtgttggtttagtaaaaataatttggatgtattttttttattttttgttttttggaatattttaagtagtaatataataatttttttgttaaaattttttaagaatttattcgtgaaattatttgagtttgatatttttgggggagtttagtattttaaaaatttaaattttttttatgggtttgtgagtttgggagtttttttttttttttaaaatttattattattttttttttagaaaagtgttttttagtttatttaaaattcgttagtttatttcgagggggttgttttagttcgtttagtgaggatagtgtgtagcgcggtgattgatatgattgattagtagagtacgatcgattagtcggtgtgtaaatatgattgattgtggttagcgttttgggatgttttatgttgaggtatatgtgtgtagtgtagggtgatgtgtattttgagaggggatgaagttataggatttttgtatttttaggagagagtttttttttttaaggttgtagttttgagtaggtagtgacgggattgggtttagggggttgagtggttttagtaggttaagggttttaggaattatgagaagtttggagttgtttagagagtagtttttaaaattagtttggattgtagtttttagaaagatatgcgattgatattacgaattaggatatatttatatatggggtgggggtggggatgggatgtattaatgaaattaaattttcgtgatggaatttttatttttattatgcgtgtgttatatttagtatttttttttttttttttttttttttttttttttttttttttttttgtttgtttgttttggagagagggaaggtttttttttatttttttttaaatagttttattgagatttaagtaagttattatataatttattaatttatttatttatttatttttttgagacggagttttatttttgtcgtttaggttggagtgtagtggcgttatttcggttgattgtaattttcgttttttgggtttaattaatttttttgttttagtttttcgagtagttgagattatagatatgtattattacgttcggttaattttgtatttttagtagagacggggtttttttatgttgaggttggtttcgaatttttgattttaggtgatttattcgttttagttttttaaagtgttgggattataggtatgagttatcgcgtggtttaatttatttatttaaagtgtataattttatggtttttagtttatttagagagtagtgtaattatcgttattataattaattttagaaaattgaaaatttgagaaatttagaaaattttttttttaagaagaaatttcgtagtttttagttattaattttgttttttttttttatattttttttttatttgtgtggattttttttttttttttttttttttttgagatagggttttattttgttatttaggttggggtgtaatggtttaatttttgtttattgtaatttttattttttaggtttaagttatttttttattatggtttttcgagtagttgagattataggtttgtgttattatgttcggttaatttttgtattttttgtagagatggggttttattatgttgtttaggttggttttgaatttttgggtttaaatgatttttttgttttggttttttaaagttttggaattataggcgtgagttattgcgtttggtcgattttagatattttttgtatagagaattgtacgtttggtttttgtgtttggtttttttatttggtgttatgtttttaaggtttatttatattgtggtaggtgttagtgcgtttttgagtaatattttattatggtatggattattttattgtggatagatatgttgtttttattagttgagggatattgggttgttgttatcgttggtgagtgtattttttttaaattaaaaaaaaaatgttggttattatttattagatcgtttttttggtttatagggtgggataagtcggtttgggtgagggttaggaggtggttaggtggaggcggttggagcggttttgggttgtttttgggcgtagtaggtagaggtgtaatggtagagtttgagtaggttttttgggcggatttttatgtcggtaatgtttgtttatttaagaagtttcggttaggcgtggtgttttatatttgtaattttagtattttgggaagttgaggtaggtagattatttgaggttaggagttcgagattagtttggttaatatggtaaaatttcgtttttattaaaaatataaaaattagttgggtgtggtggcgtgtatttgtagttttagttattcggtaggttgaggtaggagaatttgtttgattttaggaggtagagtttgaatttaggaggtggaggttgtagtgagttaaaattgcgttattgtattttagtttgggtgatagagtgagattatgttttaaaaaaaaaaaaaaaaagaaaaaaaaagaaatttttagtgttgttttgtgttcggtatcgaagtcgagggaaggtagtattagtatgagtttttagtttatcgggtttttgtttggagttgacgtgcgattaaggtatacgagggaagtatggcgaggtggacggtgcggaggtataaggagtaaaataaggtagatgtagtggtttagtggtttttggtggttgcgaggagcgtgggtaggatagttttaggagggtatttggagagtagggtcggttggggtaaggtgtgttaggtatttgttaggagtaaaatgtaaggggatattaaagagtttaggaattaatatagatagtatttaatgtagtattttttaatatcgaaatgatgtatagtaatttttatgatgaataaatgttggaattttaaattaagataggtttagttttgtacgtgtatagttttgttagagtttgtttagcgtggaatttgatttgtttaaaatgttgttttaaaatattgtttgatttttggattttttggtattgttttaatttttgtatttggacgaaggttttattttaattttagttggagagggttaagggttggtgaatttggttttggatttgtagagtttgtggtatttgagaggtggggttaggaataggaaggagttggtgagaacggtattcggtatgggatggggttagattagagtagtattgtggttttttttaattcgtggttttgttgttggatgtttggcgttggtgttgagttttcggttttttgaacggagtgtgatgaataacggggtcggggagtttttgggtttttttttgaagtagtagtgaagttagggatatgtcggtagtaggtagggagagggacgtttggtttgtgtttggagttagttgttttatggaggagttgggtgaggatgcggtgggaggaagatttttttagttttgtatttttcgaagtataattgagtgtttgtgtggtttgggggttattttggttcgaggatagttttgttttgtttagttaggttttgaagagttatcgggatacggatagtagttttgttgggtggtaggttgtttattttcgtttatttaacgttggaattggatgtagagtatttggatggttagttttagagtgtttttgatatttttagttattttattttttagattaggataagatgcgggattttaatttcgagttttttatgggttttattttatgtgtttttataagttattgggtttattttttggttttagggttgtttggttatttggtattttggtttttttatttgtataatgaaaataatagttttagttttttcgaggagttataagatgtttttcgtgtgaaaaattgggatttggtattagattatttggatttgaattttggttttattttttttaatttgtggttttgggttaatttggtttttttgtttttagtttttttatttatagagttattttattgagttgttgggaggatgaatataaggaagtgtatttatgtgtttagagtattgtgattttatttattattattaaacgaggtatataataagtgtttaatagatgtttagtgttattttacggattttgtgtgttttgtgtgtttttagtagttaagttttggaggtggggaagttgttgacgagttgtacgaggtaattagaaagaggaggttataggtgtaagggtttgggtgatatttgtggatagagagaggtcgatggattttggtagaggggaagggggtttttgtatatagaaaatgttttttgtatttaagatttttgtgattttggaatagaggtagtagaggtttgtaaattttaaattataaatttagaaagtatagaatattcgtagagaggattagaaatattatatattttagtgtgtatagaattttttatatagttaaataaaagtacgtttttaattgaagttgttggagagtttttgaggattttatattagataagggtcggtaagtggaagtttaatacgtaggagttattttttttgtttataaatgtttgtcgttttttttgtttatattcgtatttatgtgagggtatttataggtttatcgtttagttttatgttttgtttgttattaaaaaattttttaagaattttttagttgtaaatttttttatcggagggggggttttaggaatttagttttgttcggggttggggtattttagtatttgttgtataggcgttggttattaaaggttatgtgtcgtattcgtgggttttcggggtttggtggtatttgggtatatagtttagtggcggttttttatttgttagatattgggagtggggggttttttatttttgttttttggcggtggggggagtgtttcgagttgttatatattagaatttatcgatttatacgttgcggtattttatagttttttgatagttttttagtttgagagattattaaattgagtttttggagagggtggttgttgaggtttggatataggtgtggataggatagttttgttttatttcggagtttcgtttcggtttagttttttgtgggtttgaagtttaggttgggttagtttttgttttttagatggtcggaaaggtagtttagttttacggtttttttgttaggttttgagagtcgtttggtttttagttttgtttttttttttttttaagatggagttttattttgttgtttaggttggagtgtagtggtgttattttggtttattgtaatttttattttttgggtttaagtaatttttttgttttagttttttgagtagttgggattataggcgcgtgttattatggtaggttagtttttgtatttttagtagggatcggtttttattatgttggttaggttggttttgaatttttgattttaagtgatttgtttatttcggttttttaaagtgttgggattataggtgtgagtcgttacgtttagtttttagttttgttttgatttttttttaaggtcgtgaggatgtttacgtttttttttttttttacggtttattgatgtttttagatgttttgtaaagttatttttttttcgggagttttttagttggtgacgggggattttttggggattattgtttaggtagttatgtaggtttgtgggtcgtgtttttaggttggatcgagattcggtgtatggggtgtttttggtttgagttgaggtttttggaagttatagttaggaggtagtaagggacggttgttatgtttttttttttttgttttttagggtttttgcgggatagatttttttgtttgagttttttggttgtttatattttggttttttaaagtttagtttgaagttttaggtattttataatttgttttttttagtagtttgttttgttttttttttgtcgatgtttttgaaatttttttgtttttttttattttttggttagagagagattggagattttgtgggaattttcgaggggagggagaaggtcgttgtttgaacggaggtggtttttttttttgtttttttttaggcgggttatatttgtaggtttagttttttgttgtggtagcgtttggggtgtcggttgttttttgggtacgagttgggagttgagggaggcgtttttaggatcggagtggtaatttagttggaggaggagtaataggttcgtggttagtagtagtcgtcgtagggatttcggcgttgtatttgtgttttagttgatttttttcgtttttttagggtgggtcggggatggtggtttgttgtttagtttaggaagaagaggggtcgtaattagtagtagttattttaggggattttagcgttgtatttgcgatttagttgattttttttttttttttagggttggttgggaatggtggtttgttgtttagtttaggaggaagaggggttgtggtttttattttagaggtttttttttcggtttttttttcggtgttggtttaattgtaggtttgttttaggtcgtgtcggtatttgttgattgacgtttagcggatgttgataggagagggttgggatggggaagtagtaagtttcggttattgtgggttcgggttatagatggttgaggtattttttggttatttttaggaagtaaggttttacgtagttttcgatttatttattgttcgtgtgtattttaggaggttgtattttttaaggtttttattaggtaattttattgggttgggtgtcgttgtaaaattatttattgggtgcggtggttttttggtggggggtatggttggggaggatgcggtggaggagaagttagtttcgtggttggggggagggcggattattcgttttttgtttgttttttgaattggagtttatggttttttttttaggtgtttgggttatggaagaggttatagttttgttttatttttgtggtagtttaggggagttttggttagtttcgtgttttttgggagggcgatagtttggttaggttgtagggtaggattggaatgtagatttttgtttggttatgttgttgtttggttgttttgtttggggattttttgtttaggaagagagaagcgggtcggatagttcggtttagtgattggaagtttagttttttatgtttagtttagtaggaagtttgttttttcggaatatttgcgtgtttttgtatgtgtttttttggttggtggttttgcgaggtttttattgggttgcgttatgttttttggttattttggttttggtgtttggtttttgtgaaatagagatatttgggtagttttttatttgtgtttgtaagtttgtgtggttttagtgatggttgattttgttttatttagaggatttgggaatttttagtttaattgtttagaggagttttttttagtggggagagtttgagttgtttttttggtggatagttttttagattttaggcggatttttttgtcggtcgttttttttgttgtttttgtttttttgttttttatttgttttttatttttttttttgtagtagttagttggtacggggatttttttttttttttgggattgtgaatgagacgatttttttggtttttttgggtttagatttttttggtaatagttagtgaaatttttgttttaggtgggaggagaaggtttagtatgtggttataataacggttttaattatattatttttaaacgttggtttttatttattttttgttttgtttaatagttatttttattattttattttttagattaggaaattaaggcgtagagagttttagttatttgtttgaggtttttatagttaagtgtttggatttgaattttggagtagtttggttgttgagttgttttggagacggggtattgtgtagtggtcggggtaggggtggagttttgtcgtcgttgattttcgggttatttggagtgataatatagtttagtgtttgggtttttgtttgagattttggttggatgttaggagttcgagattttttagtttttttttgtgtaaggcgttatggggtgaaatgaaagaaaattttagttagaaggtgtttttttttttttttagttttttagttgttttggattttgaaataagatatcgttcgtttgtggggtgagtaggaatagattggaatcgtatttttttttttttagttatagttgttaggagtttatttttttttgttttttttttttgtcgtttttttttataagattgggttggatgttgttgggaaagttaataggaagttttttggttgcggtggaggtgggggtttgtgtttttttggggatcgagatgagggttttaggttggtttcggtaagagtagggaggtttacgtttttgtttgttggttttgttttttgttttgggagaaggtatttatatgttttagaatgtattttttgcgtgtatagggatggtttttgggttatttatttgaggtttattgatttttttttttggaattggagtggtttttttacggtggattgggttgagttttttgtttcggtcgacgtttttttttaggtatttttttttatcgtgttagggtgtaggttgttagtggatgggtttttattttcggggattggtagttgttacgtttattttatagtcgagatattttggtcgaaggttttgttaagttttatggagtgtagggattttttttgagacggtttttttttgtcgtttaggttggagtttaatggtttaatgtttcgtttattgtgatttcgattttttaggtttagtagtttttttattttagtttattaagtagttgggattataggtgtgtgttattatgtttggttaattttttaattttaatttttttttgtagaaatggagttttattatattttttaggttgaattttaatttttgggtttaaatgatttttttgttttggtttgttaaagtgttgggattttaggtatgagttattgtgtttagttggggtttttttttaattttttttggttttttttaggtgtaggattcgggttttagttttatgtgtttttgaatagttttgggttttgttttgtattttttgggcgcgtggttaggtttttcgtgatattagtaggagatttaggtgaagaagtaggtagaacggaatgtttgtttatttagtttcggggttaggcggggcggttaggatagtagtagtggttggtgtggttttttgggaggttagtttattggcgtggttagcgaatggggaggggagtttttttttttgtttttttttatttttggtttttgggtttttagggttaggtttttagagttttaggtggaggatggaggttagggaagttggggtaagagcgggttgggggtgggtggttaggcggattttggaaaattattttttgtaggtttcgttttttttagggagtatttagggttggtttcggggagtcgggttaatggttatttcggatggtgtaggggtttatttttatgaaatcgggtttatttttatgaaattgggtttatagaagtttttggtttcggttttgttttgttttttggtttttgtttttaaagtaggatttaggatagttttgaattttttgtcgaaatgtagttttttgggttttaatttagttttttagaattagagtttttggggtgggttttttgtttgtttagtagtttttaggggatatttgtgtttgttagagtaagtttaataagtattgttgtaaatttttcgtttttatagttttttggttcgtttttttttttttgttgggatttgtattaggattaaatgttaatattagggattaggttatatttgtgaattttgagataatatttgtattttttttttttttgaggttgttttgttcgttttgttatttaggttgaagtataatggtgtgatatttatttatggtaatttttatttttagggtttaagtaatttttttgttttagttttttgagtagttgggattataggtttatattattatatttggttaatttttgtatttttagtagagatggagttttattatgttggttaggttggtttcgaatttttggttttaagcgattcgttcgttttagttttttaaagtgttgggattataggcgtgagttattgcgttcggtttgatatttatattttgattaagttgttgtggaaatattgagttttttttgatagttttgtttatagagtgaatgtttaggaatcggcgaggtattttttatttttatttagatggcggtttggaggtagcgtttttgattttgtgatgggatttgttttttttgtttaagagattttagagatgtggtttttgaatgtgggggtttttgttggggtgggaacgggagttggttttggttattgtttagtgattttattttagtgtttcgattttagtattttcgattttagcgttttttttttttcggtttcgcgcggagattacgtggtttgcgttgagtaattttttattgttttcgtcgcgtttttgttgtagggaagtttttttagggagttagttgatatatttggtttttattatttgtttttgaataggaatgaaaggagagagtgagtaagaaagtggtaggaggtgggggttgtagagtaggggaaggttagagagaggggaggaaagatttggaaagtttaggtatgtgttttggaagtaggtgttagcgatgagtttatttggagggtggtcgttcgttttgagttttgtttggggttagtagggaatattttgttagggtatgtcgttgggagtttgtttttggtttattttttgttgttttgagcgttgagtagatttgtttttattttagggataacgtaaggaggttgttattttattttttattttattaatattttatgaattataagtgattatttattgcgttttgacgtattttaggcgttgggttcgaagttttatgcgttttatgggatgtatttgtattatcgtcgtagaaaacggtttttgttattattgtagagaaggtatcgaggtatagagaggttgaggaattggttttaggttatatagttagaagcggttgattttggttgtgaatatagggttgtttgattttaaagtttgagttggtttgtagcgaggtttatggtttttgtgttattgtttgagtttttggtcgagttttttggtttagtggggggtttagtgatttattagttgttttattatatgttgtggatatttttacggtttatttgggtgggagggaaggggttttaggaggtgggaggggtatagggaatatagtttagtttgtttgggtttaatattttgatttttaaggtattttttgagggtagtatgaggttaagtttttgtttttttttaggattttgtttttgtgagggtttcggggttttttgtttttttttgggggttttgttggttaggattatagagaagttttttgttgttgatttttttgtttttgtattttttggtaagttattttatgatttagttgttttgtttgtaaaatgggttgaataatattgttttgtttcggagggtttttgggaggattaaatgagatttgttgtatagaagttttttgtaagttatgttgattggcggtcgtcgggtttttaagtgaatgggtattcgggtattgagtgtgtggatttagtattcggaaggaggggttggggggtatttagaatttttgggaggtttggatttttgttttgtttagattttgagtttttttttggttagtttaatttttattagtagggtgagggtaattaggatttacgtatagttgggcgaagtcgagtgattatatgtggaagtttagcgttttttatgtaaagtgggtaggcggttaaagtgagttttgttttagtttttttattttcggggttgtttttggcgttttgtttttttttagagttttattgatttgtattatgtgattcgggtttgggaagatgggtttagttgtgggaggtcgtgcgggttggggattgagagtgtcggaggagggttttttaggaaaatttagttgtataggaagtcgggttagcggttttcggaagtttttgggttttgtaagttggattttttagatttgtggttgtggggtttttttttgtttgtagttgagagtttttgattcgtatttgagggttttagaggttcgggagggggatgtgatcgtgtttttagggtgaagtttattcgagtgttattttggatatagtttttatttttttttggttttttttttggttatggggacgttgtttggggggggtttttttatatggaaggagttgtagttgagttggcgggtttcgtatatttttaaggtcgtttgatttttagtttttaagtggggttgtatttattatttaggatttggagttttagttagagagggattttttattgtttttttttttgttttttgggaaaggtagggtttttgtgtttttttttatttagggatttggtatgttgggaggttaagaggaagttgtttttcgtttatttattttttaatttttttagttagtagagttttatttgtgtgtttagaatttgtgcgtggagttagaagttataaggttggtttagttgtgtttgattttggttgtgcggttttggatagttttagtttttttggagttgagtattttgatttgtagaggagaggttgttgtgtcggtttcgtagggttttgtgtagaggggagtgtgtgcggttgtgagtttaggttatgtttttagattggaggataggatcggaatagtgggttaggatggttagagggttttagttttaggaggaggtttttatattttttagtatttttatattaggaaatgtagttaggtttttaggttttttatgttaggaagtagtatttcgttttttatttttggttgtttgggtttgagaagttgagtatttttttcgaattcgagtgttttttgatttttgtttgggtagttgttttttttgaattgatcgtttgttttatatagttttttgtggtttgttcgatagggtggttagcgagttttttgtatagtatattttttttaggagtgttgtttgtgatgatggtgtaaagggtgttttttcgagttttcggaggtatgtagtggcgtaatagcgtgagtttaggagtttcggtgagtttttggatggagaatttgtttagattattttttagtttaaattttttttgggtgtttgttgtgtttggggcgttgatttatcgtggggcggtttgtgagattttacgttatttggttattttttttagtttttgtttattgtatcggttttttggtttggttgtttttggaatatgagggtttatttttacggaagaatatttatttgtttttttttggaaagtttttttttagattttttggtcgttttatttaggttttgttgaagcgttgttattttggagaggtttttttgttattcgtagttaaaatagtttttttatgtttgtgggtggttttttatggggtatggatgagtattggagagttttgtcgtttatttgtttatatgttttttgggagggtaggggatattgatttgtgttgtgggtgttttgtatgttacgggtgtttagtgaatgtttgttaagtattaggggagtataaaggagggaagtttttgtttaattggagtagttagggaagattttttggaggaagtggtatttggtttgtttagaatgtggcgatttgtttgtatgtagatattagattagagggtaaaggttattattataatttagtagatagttataagtagttaaggaattgttatgatatggattgttcgtgattggagttaagaaggagttagagatagaggtttttgtgttttggcgtgagtttttgggggaggttgagtttttagaatgtggggtcgtttgtgtagaggtcggaggtgggagatatatttgtgagtgtcggtgagtgtggggtgagttattggggttggattagaagatgggaatttttaaatttattaattagttttggtgttttgggagtgataggagacggggtttttgggggattaatttagtataagtggacgagatgggatgtaggggaaaggataaagttttttgaggttttgggaagttgagttagggtagagttatgatagggtgagttttagaagtaatataagaaaaaatagttagattgggttttttttttattgtgggagatgttttattttatttttttcgtttttcgggttttggtaatgggttgggtatagtgaatgggttttatttgtaggagtggttatattttttgggtatagttgttttatatattgtattgagatgggattcgaggtcgggaagaatagttttttttgtaggttgatattgttagttttcggggagggaaggacggtagggggtttggagtatttttttttgttatttatattttgtgtttgtttgtagggttttgagttttgtttgttttgttttagttttggttaggaatttgttggagtttataggggtagttaggttggaataggaggagattaggtcggtaggggagtcgagagggggttttggatagtatttagggttgagttattttgggtttgttcgatttgttatttggagttgttttcgtttgtttattatgtgtaaggttttgatttattcgggtttgtttaattagcgtttttttttaggtttagttagtttggttttcgttcgatttatttattgttattagtgttatttttgtattacgtaattagtttttgtagtatgttagttattaagtttagggttttttgtgtattttttgtaatttttatagtaattcgggaggtatagagaggttgagtcgttggtttatagttatatagtaggtatggggtattgttaggatttagtcggatttttgattttagggtttttttagggttttgggtgggatattggtaaggaagtaaggtatgaatattggttttgttttggatagagttcggggacggtggtttggtaggtttagttgatatagtgattttggtgtaggtttaattattggtaaagtgtttaagtatatatagaattttaattggggagataggcgaagcggttaagggagggttgtgagtgataggtggatattgtatttattggtagattagttgattttggtgttttttggagttttttaatttttttatttagaaaaagaggaattaatagttttatttttaaattgggtgggagtattatattcgaaattgaagtaaagttggtcgtgttataggttcggtagatgttagttgtgtaggtaatttagtgattatttgaagtaggttgtgcggcggtatttttattttgtagatgtagtttagagaggttagggtattaattttgggttatatagcgatagtttaggttatagagagtagtgttggatgggagggtgttggtagttttaggtataggttgggagggttgtggggttagtagagggagggtatattttttagttggtggggtttttttgtgttttagtatttatgtgggtttaaaggagttggaaggagggaggttagagttatttatgggtttagaagttgataagtaggttattgattttgaatttgttttatcgtatgtaaattggggataaatttggggatttaatgatataatgtaagaagtagatatgttatagttttggttatatagttagtgtataataagtggtaagtcgttagaggaggtagtcggtgagaatgggagtattttagtagtttttcgttttttgtttttggttgtagatgtatttgtttttggttatttgtgttttagtttcgtgtttttcggtgtgtgtgaggttaagtttttggggtggggatttgggggtgtgtttgtagtttttgaggttaagattaaggttgaggtcgaggttgaggttgaggttattttggtgaggaggaaattgtaggtggagaagttcgttgatcgtgattttgatttgatcgtaattttgatggtgtcgatgtcgttagtacgtaggttttttgttttcgttacgattggtttttgtagtttatttggttgagaggtgtgttggttttcgtaggttgtaaaatggggatattatcgttcgtttgggttatagcgtgttcgtcgattgtatttggggagggattgagggttgattgtgttgtggggatgttggtagagaattagagagggtatttaaaaaggttaatagttcggtggggagaggaggcgtaaggttggtttttgttttttgggttttgatcgaaagggaataggggatatatttggggatagttttttttttggaggaagaagggtttagggtgttggtgtggagtttgtatagatggggataatgagttggagggtgttgggtaggagttggttagtaataggttgacgagggaggttttgttggttgggtttggtttttaagtgagtattttgagttgcggggatttagggggttttagagattttagagttgagattcgggattatagaggggtgggttgtgtttagggtaatatagcggatggggtagatgttgcgaaatttgtttttttgttttttttttttttgttatagaattggatttttttagtttatggttgttaaattttttagatgtttttgggttttatgggcgttttatattggtttttttgtaggatagtagattttgggggttggttttgatggtatttattatggggtattttatgtaagtatagtgtttttacgtttagttttttagtttgtggagtaggtttgtgtttggttagttttattttgtggttagaggagggagatagtggttttggagataggagttggtttggggttgtttttttagtttttgtttttttagtttatttttttgttttgcgggtgttggttatttttttttcgttagttttatttttagttttttttgttcgagtcgtgatttgttagtagggggtagtggaggttttgaaagtttttggagaggattttgaagtagtttttataaatttgtttttggaaagttttttttgttatatttttagcggtttttttttttttaatattttttttggggttgttatgtagcggggggtggaggaatttattaggtcgtggatagagtagagttatgttgatataaattttggttgaatttatatgttttttatagttagcggtcgattattggaattagggaagtgattttatagtaagggttcgtagagtagttattacgtattttcgattttggtttttggatttagttttggaaaagaagttagattttagttatttggagttgtttagggaagattttagtttggtgtcggttgatagtttattggaattttttatttgtttggttaggtgatgttaaggggtagaggttagaagtgttaagaagtaggtcgagggtggtggtttacgtatgtaattttaatattttgggaggttaaggcgggtgaattttttaaggttaggagtttaagattaggttggttaatatggcgaaattttatttttattgaaaatataaaaattagttaggtatggtggtgtacgtttgtaattttagttattttggaggttgaggtaggagaattttttgaattcgggaggtagaggttgtagtgagtcgagattgtgttattgtattttagtttgggtaatagagtaatatttcgtattaaaaaaaaaaaaaagaagaagaataagaagtgttaagaagtatttgtttttttgattgaaaagtaatttttgttgggcgtggtggtttacgtttgtaattttagttttgggaggttgcggtgggagagtcgtttgaggttaggcgttcgagattagtttgggtaatagaggtgttaggggtagtggcgtttgtttgtagttttagttttttaggaggtttaggtaggaggattgtttgagttaggagtttgaggttgtagtgagttatgattatattattgtattttagtttttgggtgataggatgagattttgttttaaaaaataaaatataaataaaaaattaacgtttattttttgtgattttaaaaattatatttatttgtgataaaataattaaattagaaaatgtaaaggaaatgattaataataattgcgttttttagataaatattgttaatatgtttacgtttttttttagtttttttttatatagatatttaatatttattaatttgttttgaattaaagatggttttttttgttttgtatgagaattattttagttaggtacggtggtttacgtttataattttagaaagttgaggtaggtagattgtttgagtttacgagtttgagattagtttgggtaatatggcgaaattttatttttataaaaaaatataaaaattagtttggtgtggtggtatatgtttgtgtttttagttttttaggaggttgaggtaggagaatagtttgagttcgggaggtagaggttgtagtgagttaagatcgtgttattgtattttagtttaggtaacgggagtgaaatgttgttttaaaaaaaaaaaaaaaaaaaaaaaagttgttacgttgttattttttttagggatttttattttttttatttttcgtttaagatttgttttgtaaaaggatgaggttaaatagttatgggagggtggtattggatgtttaaaaaaatgtttcgtggttggcgggatttagaaataggttggggaggttttagtagagggtggattttagttgggggtggggggtagtaggggggttttttatatgttttttttgcgtgttttatggggttgtttgtgaggtcgtgtgaattagagttcggttgggaagttatatgttatttggattttgattttttttggtagtatgattttagttaatacgtttaattatgtttttttttgtaaaatgggttaatagaaatgtttattcgagatatgatgagaaataaaggtgtttatagagtaaagtgtttagaacggttttggtatgataggagtttatatgttagtgttgtcgttggtatcgttattattacggcggtattggttgttttgttttttttttgtttttgttattttttttttttagtaggtttttatttatttgtttatttatttatggtcgaggtttcgtttgtgttaggtttggtgttgagaacgggggtagagagatgggggttgtgttttgttttttgatttaagggttttttttgtaatgtgaagtttttggagattggatttttaggttgttttattagtttttttttaggttagtttaattttttcgtgttcgttttttgagttgttagaggaagagagcgggaggaaggatggagtggggtttttgtggggattgagcggggggtgtgtgaggttttggaaatggtgtttgcggtatttacgtagtattagtttttgttgtagttgttgtttggagaatatttttggattttaggatattgatgatagaaggtggaacgttttttttggaagttattaagaggggattatcgcggcggttgagtagagttgttgatttgtgagttgtggtttgattatagttattgtttttatgagcgaggttttttgtggttttttttttaggaatttttggttttttggtaggggatagtttagggttgggggtgggtagtggtgtttgtaggtttttttggagttagagaattttttgtcgtcgtggcggggttgtttttttttgttttttttttttcgttgtgtttttagttgtttcgataggatgtttttggtttgagagatagaaattttaattttgaatggttttagtttttaagagaatttggagtttttttgtgtaaaatgagatgttttgagtatcgaggatgttgtgggggattttttattttattatttttagtcgtggtgtttttttcggttataggatgttgtagttacgttgtagggaaggagagtttttttttttgtgagtttagggagtttttttatgtagtttttttattggttattgtttgagattcgatttggtggtttttgttttaaggagtagaaagggggttcgttaggttagggtggggttgggtgcgaggatttttttcggttaatagggtttgtttaggtgttcgttttgttggggtagtagggaagggatttatatgtggtattgggatacggagaggtttttgtgtttgtgacggttaaaagggatggcgttttagttacgtttttatttatttcgaggtttagtatggttatgtcggaaatagtagtatcgttttttttattgttttggtttgtttttaataggttagaggggtggggttggagcgggcgtttgatttgtggttggatttagttgttcgtggataggttgtgagtgaatttgtagaggaagggagatgggaatgtcgggatttttttttgtatttttcgaattttcgttttttgtgagttagatggggagtgtatttttgttttttttttttgggtattttttgcgtttttcgttttaggtatttgatgttgtttgtttattttttttttttgtttttttcgttggttttttttatatggttttaattaggatttttcgttcgttggtggatgggtagagaggggagtttgttgtggggtttttttcgatcgggggattttttagtatagagttttttggtttttgtagggacgttgtgtgtgtttgtgtgagtttggcgtgttagaagcgttaagttgtagttgttttgtgcgttttttatattttttattttttaaaggttttgggtttggtgtttgtgggttggggatttgtgttggggtttttaggaggtttttggtgggagaggtagggtttttttttttttaatttgggtaattttgttttggtttgttgtttgcggaaagtgttttaggatacggtggtaggattggttggggttttggttttaggtttagttttagtttttgttagatttattttttttgtgttttcgtttattttgtttattcgtagggtttgtaggagtattttgagagttggtagggtggtttgttcggcgttcgtatagggtttgttggtgggtggttgaggttgcggtgaggtttttatggttttttcgttttgtatattttttttttgttgtgttgtttcgttagtatatgagttcgtattgtttttgagtttgtagtttgttttttttattaggtggttaagtagggtggtagttagggtggtagagttttattggtttgtaggggattttttgtgggttgtaggtagttttttgtggttgaaggtgttttggtaggatttgtattatgattttcgttaaagtttacgtttaaggtatttgtgggtattttcgttttagacgtgagggttggtatttttttttgtacgtgaagtaaaggtttgtttgaaggagcgtgtggaagtttgggtgtgatgaaggtaaggatcggtggtttattttttttgtatttggattttgggtggtaggtttggggtttttagtttttaatttaggagggtagttagtcgttggaattaagagtgaattttagttgttgttgttatagttggagggaagaggggaaaggaggcgttgtaggggagtagagattttattttttttttgtcgatattaggttgtcggtgttggacggggttttggtaatcgtggtaggagtggtgatgttcgatgatggtaataagggttttttgaggatttcgagttgttttaagggttttttatttggagtaagtattttttttaatttttttaataatattgtgaaattgattttgttgttatttttattttatcgatgaggaatttatagtttagagatgttaagtaatttgtttaagtttttttttgagtatggtagagggagggttcgaatgcggaaagtttggttttagtgtttttatttttaattattgttatttattttttcggttagttttttgattgtaaaatttgaggtttagaggagtgtagtgatttggttagtttcgtacggtaggttagtggtagagttgagtagtgttttttatgttttgattttgtggttttttgaggtggtttatttttaaatacgttttttatggtggttttgttttttttttttttttgaatttgttagtttgtgtttaggtagggggagaagtagagtaattatgtcgggcgggtcgtcgtgttttagtgtcgtttgttttatatttgattggtagtagagtggtttttttttggtgtggtttggaggtgttagtggttatttattagtatagtttagttttatatatgttatttttaaaggatgttgatatagaatgaagtagttaggggaggcggacgttttggtacgagggtggcgtttttggtaattcgtagtgttgttgtttgtggttgtttttggttggtattttatttttttttggttgttttgtagttatttgagggaggttagtatgtcgtttttattttaggatagtgtgaatgtagtagcgtaagtttgttagcgtcgtattgcgggatttggaggtttttgtttttgagttttgtttttgtgtaatttttaaagtacggattttttaggggtttttatttttttatttggaaaaattttatatcgtttagggtttgaggtagggttagagtatggagacgttgttggaggattaagggagaattgagcgcgtgtttttttggttttagtttcgtgtgtgtgtttatgtatgggtattttgttatttatattggtttttacggttgggtgggagttgagttgagttcggcggttgtttttttattttgcgggtttggttggggagtgtgaggatgtttgttggaagttaacgtgtacgaaagagttaatggtggattttatttttttagttttttttttagtttttttagggaaagggtaggaatagagaggttttatttttagaggaaggggtgggcggggatatagcgttgttcggtatagttttttttgagttattttgtatgttttattttatcgatttttgtagtttagttgtttagagcggatttagaaggtggagagagggtttttaataagtagaggatggagtgaatgtgagatttattattgggatttggtaaagtaaagagttttatttttttttcgtagatgggacgggggcggggttggagttagcggggtgggggtatttagtaagagtttttttttatttttttattttttttgttatgggtttttttttttacgtagatttttagtttggaatgattagtgtttagtttttttcgttttttttttgtttcgttggagggagtgatttggtttttggtttcggttatttatattttttgttttgttgtattagtttcgtggtaggggttgcggcggaggtgggtaaaagtcgttttcgggtagttagtttttattttgggagtgattgaaagtttttgggggtttttgtagggtgagttgtttattttggttttggtaaggatatttaggagagggttagggtgtttgtatttggggtatagtataaagaatagtcgtaagtgttttttaggtaggagggtgtcgaagtattgggaagttgggatttagaagtattgtttggggtggtgagtggaagatgtaggatatagatttacgcgattgtgtagattatttggttttattttttcggtttatagtggaggaaattagaggtcgagagaggtgaagtgagttttttggggttatatagtttagttaggtttagggcgtcgattttttgttttgttttttcgtgtttattcggttggtattagtatttttgttttgatattttcgtgtggtagttgttgtgattttgtgatttttttttattttattttagtggggttttgcgagggaaagaagaatgttttatgtagaagtggttggaaagtaagaagtttggagagaagtgaggtttttgtggtttggtttgagtttaggatttatggtttggtttttagggatggagtatcgattttttttttttatatttttattttacgtttttaggagttttttatggggaagtcggaatggatttgggtttagagattgtaaatttattttgttggatgtgtggttgtttttatgtaattaatttttttacggagaagttaggggatggtttttagtattttcgggggttttttagtgaggtgggaggatttcgagaggttaggaggttgtttaagattttttgttttttagggattaggtgagggtttgtcgattgttttgattttttgatgtttttggtggggagattttagaggggtttgtcgttattatcgttagtggttttggtttgtttagttatttttttggggtggttaaattttatgttgtaaaagtttaagtgaattttagtagtggtttgggagaattatttgttacgagttaaggatggagtttttggggaggattttttgttgttttttaatttttttcgggtatatttttttgtagttttattttttgtaagaaagttaggtgtttttcgaagtttttttttggttttaggttagaggtgatagtgggggttttttgtttgcgttggtgattgtggttggttgttggtgtttggttttgttttgtattgtgtatttattgaaggcggtattattcgggttttttcggtggttatgtatgggtgagtagtttacgatatatttgtttttagtatcgtgtgggtcggggtttttagaggggttgagggtttggatggttttgtaggggggtgtttttggttttgtgatcgaaaggagttgaaggtttggagaagtcgttgggtcgaggttagtttttatagatttggcgaggagggaatagatgtttacggagttgttttaggtattgtatatattgttttattttgcgttgatagttaagaggttggtttttcgtcgatttttattttatagataatgtgtttttttagttttttagtggtggagttaggattcgaatttacgtaggtagttttttgggtttgtagttttattttttatttttttttaggatttatgttttggggttggtaggataatgatttttagagttgagtatattttaatttttagtatttgggattacgttaggtgatatggtagggttagttaaggttattaattagttggttttaaaatagggagatgattttggatgatttatacgggttcgttgttattataagagtttttaaaagcgtaatagattatttgaggggtgtagtgggagaggtttggaaggaggaaggaggttataagttaagaaatgtaggtgaatagaaaatgtaggaaaacgtagttttttttgtagtttcgggagggtgcgtagttttgtggatattttttttgtagtttagtgaggtggagtgtgggattaatttgtgttgtttgatattataagtgtgtggttatttgttatagtagtgatgggaattgaatgttattaggtagtagtgtttttatttcggaagaattaggataaatttttttgtggattttaagttttgggagattttgggtttttttggattgttttagttttgtaattataggaaaggttttttatgtttgtttgggagaagaaaatttcgtagtaaatttatttttttttttgataaatgaaggcgagggtgtgggttggatatatgttttttttttgtggattttttttgttttaatatttagaattttgtagttgaaggagattttggggggttgtttgtttgatttgtaagtgaagaaatggaggtttagggaagttaagtgattggtttagggttatgtagagttatgttggaatattaagttagatagtttagtttttgttttaaagtgtttttttttttggttggggaggagggttggagggagtggatttcgagtaatagtagtattggtaggggttggaagagtagttattgtatttaggtgttggagtttttggttattttttgtaggaattaggtgatttattatggtataggtttttttttgtttatttgtagttttgggggttttagggattagaggatattttggtttgagggttggggtttgagagaagagatggaagtatttttagtttggtttgttttcgtggcgttttgtaggtatattcggtagtttaggggttttagagaatttggttggtgggcgtttttattttgtcgtagttgtattttgtggttagtagtttgtaggatttgggttgttgtttgtggttttgaaatagttattttttgagttgagtggggattaggtgagtagatttttatattttaattgttgtgatttttttgttttggaggttggtgggtagtttggttggtgttttatggtattttatgatcggttttgttattaggttcgtgagttgttttttttttttcgggtattttgaacggtttttttgagagtttcgttttgggttttcgtttttgtaggttttcgttgtttggggcgttttttttttttggaagttgggtttttttggggatttattaagaagggttttgtcgagtgttgttaaattgttttatttggtttttatttgttttatttattattttattttaatttttatgttttttttttggttttaagatttgagtaggtagggtttgtgaggtattttaggttttttgatgttgttagtatttaggggattgttagtatatatgtagggagggaaggaatgaaggaagagatgatttggggagttttttagtttttatttgtaattggtatattgcgataaaatatttatggtattttattttttttatatattttttttttaaatttatttttatttgagatggagtttcgtttcgttatttaggttggagtgtagtagtataattttggtttattgtaatttttatttttcgggtttaagcgagttttttgttttagttttttaagtagttgggattataggcgtttattattacgttcggcgaatttttgtatttttagtagagatggggttttattaagttggttaggttggtttcgaattttcgattttaggtgattcgtttgttttcgttttttaaagtgttgggattataggcgtgagttattgtatttggttttcgtatatttataaaagagaatttgtttagaaaattttttagatgtatttttagggttttaaggtatagatatatgaagtttgttagtgagtagttgttgtttattttttttttttttttaatttagagcggtttgcgttttaagcggatagttgtttttttttttttggttttttgttgtttacgtttttatagaagtagggagaagaggtaggaaggtgacgcgtgattattcgttgggcgttcgtatagtgtcgtttgtataggtgttattttttttatttgttatttttttcgttgagtttttttttttttttgtagatgagagagtattgttttttagaggttaagaaatgggtttagagttatttagttgattagcgtgtagttagatttgaattatattttgttgatttttatgtttgtaggtttggtttgatgagatggatagttgggtggtggagattttgagattttggatggtttttaaatagggtttgtagtttttggatagggagagtttggtataaagggtttgtggagtgagttgggggagaaggtggtttagggtttttgtttttgaataaatagatggaggggttattttagcgtttttttagtttttggtgtgttgggtttttggttttgggaggagagaatggagttggtttttattttgggttgggttggtttgggtttaatttagataagttttttagtttgttatgagtgatatttttgtttgttttggtgtttttgttaaaaatatgaagggttttagaatttttatttcggtttgttttttttttagatttggagtgggtttggggttgataatagttttatgttagatagtttgagtagttattagtgttattaggtttgatattgcggtttttgtttcggagggaaaaataaggttttttttgggggattttttgttagtttgtgaaaataggtttggagttagttagcgtttttatgtttagatatttcgtgtggtttttaaagtgtttttatgttgttagtttatatgattttttttaaaattttataagggagggtaggaagtttgagtaatagtttgttaagtatttatatagtaggtggttttattgttttttatttatagataagtaaattgagttttagggtggttatcgtttgttttttaagttatttagttatttagttacggaagaggttatgattttttatattttagtgaagttgaagattttttttttcgtttttaaaaatgtttattttttagggtagtgaatatttggtgtttttgtttagcgtaagaggtgaacgtttgttattttcgtttttttttttttattagatttgattttttttttgtgacgggaatattttgtaggtagtttgttttgtttttatagattttgagaaacggggtttaaattgtcggttgtgggtgggataggcgatattgtagtgaagaggtggagtatttttgtagcggggaagaaatatattttttttatttttttaggtttagtgtttgggggtttgtgaattaaatttatttaagataaattaatgagagaaaagatagatttaattatatacgtatgggattttattgaaaaacgtgatttaaaagagtaggtagaaggtggggttcgtgattggttcgaaggtagtgagttattttagttgattgtttatagttagttatagattagattttttgttttattgttttttttttttttatttgttttgttttttttgagttagagttttgtattgttgtttgggttggagtgtaatggtacgatttcggtttattttaattttcgtttttcgggtttaagcgatttttttgttttagtttttcgagtagttaggattataggtatttattattacgtttggttaattttttgtatttttagtagagatagggttttattatgttggttaggttggttttaaatttttgatttcgtgatttgtttatttcggttttttaaagtggtgggattataggtatgagttattgtatttagttaattagttttaaaaaaaaaaaaaaaaaaaaaagaatttagggttcgtatattattttaataggaaaaaaggaaggggtgaaagtatatattatgggtcgggtgcgatggtttacgtttgtaatttcggtatttcgggaggtcgaggtaggtggattatttgaggtcgggaatttaagattagtttggttaatatggtgaaatttcgtttttattaaaaatataaaaattagtcgggtatggtggtgtatatttgtaattttagttatttgggaagttgaggtaggagaattgtttgaatttacgaggcggaggttgtagtgagttgagattatattattgtattttagtttgggtaatagagtgagattgtgttttaaaaaaataaataaaaaaaaaaaagtatatattatggtaaaataaatgagtttttggaaagataaataggtttttaggagttgagatgggagatgtgaagttttgtgataatgtttttttaggtgtggtgtggaaattatttatattttttagggaagagttagttgtttttagggagtagatttgggtttgtatattattttaataggggaaatggaaggggtaaaagtatatattatgggttgggtgtaatgtgtttagtgtaggaggtagacgtggtttatggttgttgttgaaattagtgtagggttcgattgttttgtattgagtgttgaggattttggttttgtattagttatgagtttgtagttttgggatatatttgatgttggtttaaggggaaatgaggttggaggggtagggtggttggattggatgtgggtttggggttattgttgatttataaagtggttattatacgggaataatagagttggttatagattataattagtaatattatttaaaagtaaggttatatttttaataataagttatattttaagttattattaatttataaaatatattgttggtataatgatagttttttaagaaggatataaaaaggtatgttgggttgggtgtagtgatttacgtttataattttagtattttgagaggttgaggtcggcggattattttaagttaggagtttgagattagtttggttaatatggtgaaattttgtttttgttaaaaatataaaaaaaaattagtttggcgtggcggcgtatgtttgtaattttagttacgggggaggttgtggtagaagaattatttaaaatttgggaggtggaggttgtagtgagttgagatcgcgttattatattttagtttgggtaatagagttagatttcgttttaaaaaaaaagaaaaaaaagaaaaaaagtaaaaaggtatgttgaaggtatttgtttgtggaaagttgtaatttgacgggaggtagggcgagtattttttagaaaggtggaaatgggtttttttgttatagagatttataaatatagattgaggtttgtagtttaggagatttaaaagaggtaaaggtgaataagagttaaggtttttaagttagggtttgattttgggggtgggggttatatatgatggaggatgttaggagggttttttggaggtggtgatatttattaggggggattttaggtggggtttgcgagatagtaggatttggttgaagagcgtaggttttttagataggagtgggaatttaggtttgaaaatgagttggttagattgtaggggttttcgaatgtaagggaagaattttaattttaatagaggagtttgggaagttgtttgggaaaaggagtgataaagcgggaggggttttttagtagagttttgtatgggtaggagggagcgagatgggaggtgggtgttggtaagggatgattttagtggtttaggggagtagttatagggtggaaattaattttgtggggtttgggtaggaagggattgatttgagatatcgggaagaaatagttagtaggattttggtgagagggttgggggtcggggaggggggtgtggagagtgggagtttgagtttttgaaaatagatagtgttttaagggggagatttgaggtaagatgtggagaggtagttgagttgggaagttggaacggaggtgtggttattttaggagattaagttagggggcgaggggatttttgggagttatttagattttagtattagggaatacggaggggagaaggaggggagaagaattagttggtgcgtgttaggtattgttttcgaggttagatggggtggggttggatattggttatgaggatttttttaagagttgggttaatagtgagacgggcggatattagatggttcgggttaagaagtaagtgggcggtgggaagttagaagtcgtggtgtagatttattttgagaggttgggttgtttagatagggagaaagtttatagtttgaggaggtagataggttaaaggaagagggtttgtttgtttttgagattggggtattttgaacgtttttttaggttaagtgagaagaaattagaagaggaatatgttatttaaatgtgttgaaatagtttagtagttgcgttgttttatagaaaatgtgtagaggtttttttgttttattatgtttgtttggggacggtttttattcgggttatttagggtttttttagtttgttaatttaagggtggtaggagttgtgggtgtttttagtttttttttaaggttggtttgtgggtagaaatgtgggttgtttcggggcgttatagttataaatgtatattagtttttagaattatatttttgttttttagttttttttttcgtatttttatgtagaagcgcggtcgttagtttataaaggatagggagggatattgtttttggtatttgatgggaagtatttgttgtattttattggggtgttgtttaggatggattggaaaagagttggtaggaaggttgagttttgtgtttataatttggtttggtggtggtcgaggagtttggtaggagtagagtgtaggatttgggaattgggggttggtgtatgtgtgtacgtacgtgtgtgtgtgtgtgcgtgcgtgttgggtgggtagggaggaagttgtgaaattatatttttttttttttgttgttgtgttgttgtgtgttttagtagtacgtgggtgttattatattttttagtaggtgttaatttttaagattgttttgggttttttttttagttggttgagttggaggtgggagttttaattgttttttgtggtttttagagtgggattttgttgtgggataggttggttaatggtgtttttttttttgtgatttttttgttgggtgggttacgaggaaggattgtgggtgttgtttatagataggtggatatgtggtaaggatattttgggattttttttttgacgttttttgaagggggtatttttttagttttgagatgagtttttgtggatgtgggaagtttattattttaagagtagtagttttggaaaatttaatatagaatttcgagtaggggcgggaaggggttttgtttcgtttattggttgtttggtagagttttgtataaggaagcgtttgtgttgttgtgggcggaggaatggattgagggttatattcgttttttgttgtcgttgtaattgtttattataaatttagtggtttaaagtaatagaggtttttttttttatagtgttaagggttagaagtcgattagttttatcggattaaagttaaggtgttggtagaatttatttttgttttttttagttttgggtgggaggttttgttggagttttttggtttgcggttgtatttttttagtttttgtttttatttttttatagttttttttttttttgtagttagatttttttttgttttttttttttttttttttgagacggagttatttaggttggagtgtagtggtataattttggtttattgtagttttcgttttttgggtttaagcgatttttttgttttagtttttcgagtagttgggattataggtatgtgttattatatttggttaatttttgtatttttagtagagatagggttttgttatgttggttaggttggttttgaatttttgattttaggtgatttgtttgttttagttttttaaagtgttgggattgtagttatgagttattatatttggtttgttttttttttaaaggacgtttgtgatttggggtttatttgggtaatttttttattttaatatttttagttatatttatagagtttttgttgttatatgaggtaatatagtttgggaagggagagttatttagtttattttaggggtttgtggtgtattttagggtttttttgattttaagatataaagtaagaaaataaattggtttaaggggaaaaaaggatacgttgaattttgttgttttaaatgtatatttttttattgtgttaaaatgtatagaatataaaatttgttattagtaatattgagtatatttatagtgtcgtgtaattattagtattgtttagcgttagaatttttttattattttaaagggaaatttcgtatttatgaaggatttattttttattcgttttttttagtttttggtagttattagaatgttttttgtttttataaatttatttttaataagtgtaattttgtgtgattttaaaataaataaatatgagtacgatgagttgtttattggaaggatatttatgcggggaggtcggcgtgtggagtgcgtaggttttcggacgggtaggagttgaaggggcgtggatgtgtcgtttttttttttttttgttttttttttggggttattgtttgagtatttttttttgtaaatggttttaaataatgttttagtttttacgtttgtatcgttttttagttttaggattttttattaaaaaatattttaagttttagatttatttttgggaaaattttaatggttttatttttttttttgagttagttagattttatggtttgtggcgggttgtttttgagttttgagtatttgtgagttagggaagtaggataggtatatttagggaaggggaagagtcgtcgttagttatagtaattgatatttttggaatcgtttaagagatatttagcgtgtgtttaaaatatttatttttttttttgtttgttttttgagacgaagtttcgttttgtcgtttaggttggagtgtagtggcgtgattttagtttatcgtaatttttttttttcgggtttaagcgatttttttgttttaattttttgagtggttgggattataggtatatattattacgtttggcgaatttttgtatttttagtagtgattgggttttattatgttggttaggttggttttgaatttttgattttaggtaatgtgttcgttttggttttttaaagtgttgggatgataggtgtgagttaatatatttggttatatttattttttaggagaagttttgtattttttgaaagtgaaatgtttttaggcgggtgatattgatggtgggatttgtggttttattagtgttttatgagagatgtcgttgtgtgttttattaagttgtattttattgttttttaaatgtggtttgtagatatggtgtcgagaatgatttgggaggtttaaattataatatggtttaaattaatagttttttgatgatttggtattattttaggattaaattgagattattcgaggatgggcgtggtggtttacgcgtgtaattttagtattttaggaggttgaggcgggcggattaattgaggtttgtagtttgagattagtttggttaatatggtgaaattttatttttattaaaaatataaaaagtagtcgtcggatatggtggtgtacgtttgtagttttagttatttgggaggttgaggcgggagaattgtttgaatttaggagacggaggttgtagtgagttaagattacgttattgcgttttagtttgggtgatagagtaagattttgtttttcggtaattaaaaaaaaaaaaaaaaattgagatttttcgagttgtattgtttagtatgatagttattggttgtacggggttatttgaatatttgaaatgtggtgattttaagtggagaggtgtcgtgtgtgtgaagtgtattttgggttttagagttttagtaagggggaaagaaaagaatattaaatatttgttatttttatattgattatatgttgaattgataatattttgggttttgttaagtgaatgatattaaaattaatattatttgtttttatattttttaatgattttttttttttttttttttttttttttttttaaatatggggttttatattgttgtttaggttggagtgtagtggtacgatttcggtttattgtaatttttgttttttaggtttgagcgatttttttgttttagttttttaagtagttgggattataggtggttgttattatgtttggttaatttttgtatttttagtagagatagggttttgttatgttggttaggttggttttgaatttttgattttaggtgatttgtttattttagttttttaaagtgttggtatgataggcgtgagttattgtgtttggtttgtttttatattttttattgtaggtgttggaaaatgtaaggttgcgtttgtggtttatgtgtcgtttttgttggagggttggatcgagggttagtcgagaaggttttggggttgttttatttgaatgttgagtgtgtgttgagcggtagagaattttgagaagtgttgaaggatagaggttttgtgtgggggatgtagttttaggtcggagatgttttttttgtgttttggagatttttatttggtgatagtaagaggaattattgtaagaggggcggttattttagtaaagtatttaggatgttggttttttagtttaggaatttagaggtagaggaggggaggaggttgggtttggaggagagtagggttttgggttttgggaaaagtttggggggttagaaagttgggggatagattgaggttagaggtaaagagaagaaggttcggagaggagggttaaggaagaagggttttgtttacggggagggagaggtttacggggtaggggcgtggtgggagttgtattttcgaggttttttgttgattttgatatttggttagaaaggagttttttttggtattttttgttagcggtttttggagttgttttttaggggttagtgatgagggtgttttgggttgggttgtagatagtggaaaagataggttttttttatttttagtgttggggaaattagttttttggaggaagggggagttgtattttttgagtggtcgtattttttggtttagacgtgtgtgttttgttgtaattttggcgattggtgttggtggtgtttattttatggatggggaaggttaaattttatagatattgagtgataggtttagggttttggattttagtgtttgatttagaatttaggtttttgatttgttattagttttttttttatttagatgggaatagggatttcgggtatgtagtttttttttagatattttttcggttttggtttggcgttcggagattagtagtagtagttttttacggtcgtttattgtgagggtggggagggtcgtgggattaggaggttttagggggaaagttggttatgaggagtgggaagcgacgggttagatgttagtgattgttggttggggagtcgttggacgtggttggtttgtttggttagtgtggcgggtgtttcggggttttagttatttttagttacgtgtgggggtgcgggatgggaaaggtaagagtgtgtggagtttagttagtatttaatatgaggtttcgtgggggttgtttgagggcgtagtttttagaatttagtttttggtttttagaaggtgttattaaaggtttttttttatttgagtgaattttttttagtttttagtaagttttcggaacgagtttatttttaggcgtttttttttagtgtgggagtggttacgtttttgttgggagtgatttatttgggtttagaggtcgtggtattgagatgggtttggtagattttagcgtttaggtttagtttttatagtgttagtttttttttttggggatttttttgtttgtgtttttttgggttttagtatattttaggtttgtagggagggggagaggaagagattgatttattggttaggttttttaggggttggagaggttggagaggtaggagttggattagatttgaatttagaggttttcggaggaagagtttagggtgagttgcgtttttattttttgtttttttttttttgtttttttttttttttatggttttagttagtaagtatttggggtagaggggataaatttaggtggttgtgttttagttttggttgtaggtttgaatggttttttggggtggttggttatgttttttgagagtttagttgtggcgatgtttgagtaggtaggtgggggagtatttaggaagtaggggtgttaggtagagtataaggagagagggtgtttaggttagttttaggatttggttgagaggagggggttttttacgggtatcgtttttggtaagtatagggataagggtaaggacggtatggttagaggtttttgggagttttttttttttttttttttttagtagtttttttttattttttttagggattttgttatttttttttagcgtgtggtagttttttggcgtttttttcgtgtttttaggttgtttttgcgtcgggtttgtcgttgggcgtttttatttttgtttgttttttttttttgtttttttcgttttgtttttttggagtaattttttatcgagtttttttttttaggtagtcgaggtttttttttatttttgtttcgcgttttgggaggttttttgtttcgcgattataaagtttttttgattttttgttcggttttgagttatgtgattcggtgggcgggtcgcggttttcggcgcgtttagcgtagttcgacgtttcgttgttggggtgagttttgtttttttgttttttttagttttgtattattggttcgggggtttttaggtggcgcggtcgcgaggcggattttgatggttatggtggcggtgtcgggagttacgttgtttttgggtttcggttcgaggtcggtaggatcgagcggggtttttaggagaggggtggcggggagttcgatttttacgcggggattagattttcggttttaaaatagaagaatagggttttgtgtggttatagttatttttttgtaaatatttggttaattaagttgagtggttaagtttttttgttgttcggagttttttggaatatgtttttttttcgtaaggggtttttttggtttttaggagggttaggaagaaattcgaattggttatcgttttttttaaaattatttcgtttaagttattatttttttgggttttcgaagatcggttggttggaggttggagatagttttaatgttcgaaatgtcgtaatcgaagtttttcgcggcgtcggtattgggatttagggagttgttgttatagcgtagttttggatttttggatgtgttggatatgtgtagggcgtttttgggaggagcggggagggagggtgttgttggcggggttggtttgcgtgtgttttgtttttttataatggtatgttgcgtgtcggttatgtagaggtatgttagtgagtaggggttgagggatttttttaacggatttgtttttagagggtttttttatgttgggagaattttagagattaaattatgtagttaacggggtggttttcggttttaaagtagggaggggcgaggagttttgtaggtaatgttatttgtttttgaaacgtcgttttagtgattttggggattgatttagtttttagtttgttgtattttatttttggtttttttttttttgtttttttatgtgaaatttgttgtgttttggttagaggtttggggaatagttttttgtttatttaagataagtttgtaattttttttttggagaaaaatatgttattcggaagtaggttgagtagtggttttttggtaggtttgttcggggttgtggagatagtatttgttggattaggatggagttggaatttggtttggattttatatgagaaaattcgttggaagaggaggaagtagaaaaaggttttattttttaataatgttgtgggttttttttttttatttattgttattttgttttgaaatttaatggggttacgtgtgtttttatgaatgttattttttttggttaattttttcggtagttttaggagtttttttttaggaaaaggaagaaggtgtttgtttagtatttagtatacgagtttttgttggaaaggtgggatttttgtttttttttgggttttttttaggttgagatgtggttaaggaaggtttgtggtgtggttcgttttttttaatgttcgtttttggagatttgagttgttgttgatttttagtttgttttttttgttttttggttatttttgtgtcggggtggttgagatattattgtattggttattttgtgtttttattagttttcgtttttgtaggttgttattgtgatggtgatggggttaatttagttgcggtggggaggatttattgtgtgcgtttggggggtggcgtggggtattttgggatgagaagatgcgatttttgttttgagagttttgttttaatggaaggcgggggtatagttgtaggtagaagttattaagtattgtggttagattagtattttatgttaaaaatggttttgttggtcgggcgtagtggtttatgtttgtaattttaatattttaggaggttaaggtaggtagattatttgaggttaagagttcgagattagtttggttaatatggtgaaattttgtttttattaaaaatattggttaattcgggtatggtggcgcgtgtttgtaatggtagttattcgggaggttgagataggagaattatttgaatttgggaggtggaggttgtagtgagttgagattgtgttattgtattttagtttgggtaataagagtgaaattttgttttaaaaaaaaaaaaaaaaagttttatttgggtttgggatttgtttttcgaatattgggtttattgtgttttataaggatttttatttcggaagttttagatttatttgggtaattagagtttttgggttgattattttttagttttggttagttttttgggttatcgtatttttttaattttttgttgtgttacggttggtttaagttgtttttattagataatgcgaggtatttttataggaggggataatttcgtttttaggagttttttttttttgtttttaggtttggtgtagtgtgtggtttttttgtcggtgttaaaggttttaaggtttttttaagaagtttgttattattattagtagttttcgttatttggtttttttgtatatgtaagttttttttatatatttcggatgtttagggttttcgttttttttttttggtcgggagtgtgggaagagggttttattttaatgtttgagagtagggttaatggttagggtaagttgtgggggttttttttcgtcggtttttttttgtagtttttattttaatatagagtatcgatattatttgggttttgggaagatttggaggttgattattttggaggtttttagcgttttatagttattttttggggaagaggttttttgagggatttgtggtttttggttgggattttagttttagagttttgtttttcggcgtcgagttttgatttgtttattgagtgttagttcggttttcggataggtagggatttgttttcggagtttagtagagttttgggaagtttttttaggagggttttcgagggtggcggttatgtttagttcgttgtacgtgtgagtttgtttgatgaggaattggttgggaaggcgcgggtttaattataggtttatgagggtttttttcgtttttatttaggaagtagcggagattttggtatatttagtatttgggtttgtgtttgtttagttgttggtggaattatgggagttttgtttcggggtttgtagagtagtagtgggaattttttttattttagttttttttagagttggttgtttaaattcgtcgtcgtttagtttttttttttttttttttattaattttgggaatcgtatattgtttattttatcgggtttcggagcgggtgtaggaagagagagtttaatatttagaggtttgggttttttgtaggcgtttgagttgttgtggtttgagttgggttttttgttggaattattatagtagatttaatgatttgtttgtaggagttgttttattttagtcgatttcggggttgcgggaaggggttgggttttggttttgttgggggtggggggttagtgtaaagggtttgaaaagtggtagaggtgatggtttatttgttttttttttggtcggtcggtttaaacgcgattggttttttttttttttttttttttttttttttttttttataaataatattaaatgcgatttgttaatgtatttatttgggtttagtagttggattatgggtagaagtattttagatttgttattttttttaagttaagggtggggaatattttttgtgagattttggtttttgagcgtttaagattgtttttggaattttaattttgggtcggttttaggggattgacgttgatggagttgttgatattgattttcggtttttgtatggtttttaggaagggggtttttcgttttttgtttcgtcgagtttggttggtagtattttttttttaggtttgtgttttcggtagggtttgttgttttcgttttgttttgtgggtgttaggttttaagtattaggtgattcggttattgaatggttattgaatagttatttttgttggtgtttttagtggaatgtgtatggacgtttttttttttttagatttttgttttttattttttagtttttgttttaggggttattataggattaggaggtacgtagacgtgggtggtatatttattgggtagatttagttttgaatttgtacgttttttttaagggggtttttagcgggcggggttgatggtgtcgtttttttttttgttattagaacggatatgaggattgtgttttgtcgatttacgttttgagtttttagacgttataggtgtttgtttaacgagtgtttgaatgaatggttagtattgtgtgatcgtagatttttaatttttatttaaatagtttgtggtttttgtgaggttatttcgagatagttttataagaatttttattttttttgtacgtttcgtataaggtttttttggggggttttttagaaaaagggttaaagagtagtattttttcggggatttgaatacgatttttttcggggtaggggattgttttggaagattttcggtatcgttttttatgcgttacgtgattaggagggttttggggtaggatggtgttttttgtgttttgtgtgttggggtcggaggaaatattgttcgtggtcggtgttatttgttagttttgaagattaatgatgggttggatagtggttttattgagtgggagggagaatcgttgttgtttgtagttggggggtcgggtgggtgggagtcgaggttagggagaatagcgtagatttggtacggagaggtttggaggaggagtagggggttttagttatttagggtgtagggacgttatacgaggagtaggtgtggtgtgcgtttttttgcgggttttttattttttggtttcgttatttgtattaggttttgtggtgagagggtatagagtggaggaaggtgtcgtggttagggtaggttatacgttgtgttaatggattgttgttatttgtcgtttttgtggttttgttgttaggattttttagtattaggtttttattattaggtatgggttttataggtattattggtttttcgaagttagggatagattttatagataatattgagtttttgtagttagggatgggtttttacggttagtattagattttagggattagtatcgggtatttatagttagggataggtttttatggttagtattaggttttagggattagtatcgggtatttatagttagggacgggtttttatggttagtattagattttagggattagtatcgggtatttatagttagggacgggtttttatggttagtattaggttttagggattagcgttgggtttttatagttaaggataagtttttacggttaatattagattttagtgattagtattagatgtttatagttagagatgggtttttatggttagtattaggttttagggattagcgttgggattttggatgattgaaggagggtacggttgattaaagttgtaggagttagtttggttattttgaggtattaagttattattgcggttttaggggatttagatttttttatttgtttttttgaattttggaattagatatatttgggtttagtttttgttttcggggttgtgtgtttgggatggttgttttatttttttgaagtttagtgagatggggacggttgtatagggttcggtatagatggtattcgatggtatagggttatttgtttgtatttatatagtttcggttttcgttttggttgcgtatcgagagttttatgtttagatttttgttgagtttttaagtttttggttatgttttaggtttttcgtgagaagtattattgtatggattatgtttcgggattttattttgggttgggaagtttgttttatttttttaagttttttttagaggcgttttatgttttattatttttattgtttgaggggttagataggggaatttagtgtgggaggtttagaggtgtcggagtagacgttaagcgagtttcgtgtttatgcgttgggttttggtagatattttgaatgagttttttttttaggaaggagattggggttttagtttaagttgtggttttaaattttgtgattaagagtggagaaaaggtaagatttttttttttagttttttagaatagtcgatagtggtggaaatatggggtttatattgaatttttttgtaatttgttgaagagaatttagtttatatttttaggggtggaggtttggtcgatttggtagtgtgttcgtttttttggttatagtttattttggatcgggtattttggtgtttttttttagtgacgtagtgaagttattatgacgtgtttagttggtgagaaagtgttttttgtaatgttttattttttttagagggtgaataagttttgtttattataaataattatttatagaatatatgaggtttaatttaattttgggttacggtagcgttttttgggtaaatttacgcgttattttagttagagtttgtgtttttataggttttttggatttattttgaaggggggttggattttttgtttgtttcgatgagagggttgtaggatagtttttagcgagtttttttgagggttgtaatttttttttttggtatttttttgttcgttaggaatgttttaagtttttagtagaagtttatttattatagtcgttttttattttgtttattattttttttgtttttatttatttagtagatttcgtgtatagtttagtgtaggatttagggtgggaaggtgtttcgggtgggttggagtaaggtttttagttagggcggggttttaaggtgggtttatagttaggattgtgatttgggaggtttttttttgttttgttttagtttcggtatcgtcgttgtttttgtgtttagtggagatttattggttttaggttttaaaattttagcgaggtttgtagatagggaggagttttattcgagggtagagtgattgtcgggtttatttgtttgttacgaattacgtggttttagatttgttatttttttttttttagagttatggttttttgtttgaaaaatggataatgatggttattatgttagggattattttgaggataaacggggatgaaattgaagaggtttagtacggaatttggatatagaagtgttaattgtgtgttattagttgcggtggttgttaaggtttaattatatggtagttacgggttgagtggcgggcgggaagtggggagtaggagtatgtaagatgggtatttttgaagtttttgatttagtgagataagtatatatttagttttaagatggagtgttttaggaaggtggagattgtaaaggttttgtggcgtaggagtgtgagttgtatttttgggttttttagaattttattagagtttagggaggaggttagtttagatataggggtaacgggagagatgggagtgagaaaatggtttggcgtttggaagtggagtttggaaaggtgggcgtggggatagaggagggttttgggggttatgggtttatgcgtttaggaggtggaggtagtgaacggggttacggtcggttttatacgtggtattattagttttgttgagtttgtatttgttttttaggttttttgagtgttattattatttggtattttttggtttgatttttgttttttgttcgtttgggaagagtgagattatttgtttaaagttttttagttgtttttaattattttggttgttttttggttttgtttagggttagtcgttgatttgaattgtttggtgttatttttttagatttttggggttttgttttggtattaatagttatttttatttttattatttattcgtatatttatttagtagtgttttttgggtatttatttagtaatattaaggcgttgagatgcggttgtggttaagattcgggttcggtttgtgaggatttcgtagttgttatttttttagagtatagttttagttaggtatattgtggggtttagaaagagaaattaatatattgtgttcgtttattttgagttgttataaggaatagtcgaggttggggggttatttgatttacggttttgtaggttgtataagtggtgttagtatttgtttggtttttggggaggttttaggaagtttttttttatggtagaaggtgaagggggagttggtacgttatatggcgagagagagaatttttagattttttttttttttgaaatggagtttcgttgtgttagttaggttggagtgtagtggtataattttcggtttattgtaattttagttttttgagtagttgggattataggcgtatgttatcgcgttcggttaatttttttgtatttttattagagatggggttttattatgttggtcgggttggttttaaatttttaattttgtgatttatttattttggttttttaaagtgttgggattataggtgtgagttattttatttagtttttttagattttatagtaattagatttttcggattttgtgatcgtggggagggtattaaattatttatgagggatttatttttatgatttaagttttattttttttaggttttatttttaatattagggattatattttagtatgagatttggaggggataacgtttaaattatattatacgtgatttttttgtgcgtgcgttagtttttatatttggttaagtagtagaagttttttttttgttttttgttgagagagcggtgggggagaaatgatttagggatgggaggttggtttttcgaggggttttggtgtttgtggagtgggagtgcgggaaggtttttacgttgtgtgtgtcgtgttgggttggttttttatagtttatcgtggtgtttttcgaggattgttggggaggaaagagttaattaatttggggatttagttgttgaagttattattaaatttgagtagtttaggggtttttttttttttgggttttatgttatttagtatagtggggtttaattgaatttttttttattttttaaggtttttggttggcgtggttggggtttgggatacggggagcgagagggtttgggttttttttagatttggagtgggtttattagaaatggtttaggaaatcgcgggggttatttttagtagttgggggtttttgtggttatttttttttggttttgttgagtagttttggtttttggagtttttagtaagggatgtgggggtttgttaggttagggtttttattgttgtcgttatgtatagttgtattttgtattcggggagtggggtgtcgagtggggtgtttgggaggtaggtttttttttgttttttttgtttagagattttggggatgagttgagtgagattttttcggtttttgattggttgtgtttttgttgttattttttattttttttaagtggaggtttatgatttttttttttatttaaaagggttatttagtgatttagtagattttagtttgtgttatttagggtttttttaaaaatttgtggggaggttgggtttggtggtttatatttttaattttagtattttgggaggttgaggcgggtggattatttgaagttaggagttcgagattagtttggttaatatggagaaattttatttttagtaaaaatataaaaaattggttgggtgtggtggtacgtgtttgtaattttagttattcgggaggttgaggtaggagaattatttaaatttaggaggcggaggttgtagtgagtcgagattatattattgtattttagtttggacgatagagtgagattttgttttaaaaaaataaaaataaataaataaaaataaaaatttatggggggatttttgtgtttattggttggtgtgaggagagggtgaggagttgtagagaaggtattaggttgaggatcgtttttatttttgggttatagaattgaaggaggggatatatgaaagatgtttttagattcgggttggaggttggggatattcgagggtaaggacgacgttgtttttgtttttgtttgtagaggagtgtatagggtttattagttttttgttgttgtttaagtgatagttttatggagatagaatttatatattgtgacgttgatttttttaaaatttatagtttaatggttttgttgtatttataaagtgattgtattagggttatttagagaaatagaattaatagaaggtgtgtacgtgtgtttagataaagagatttattattatgaggagttggtttattttattatagaggttggtaagtgttaagattggtagagtaaattagtaggttggagatacgggagagtttatgttgcggttttggtgtttatttgaaggtttaagatttaggagagttaatggcgtcgttttagtttcgagatttaggaaaagcgtatgtgttagtttgagtttgaagtaggaaaaatttgatgttttaggttgaaggcggttaagcgggaagaatttttttttatttaggttttgtgtttttttatttagatttttaggtttttgttataaaattataaagatttgattagaataaaatttgagaaaaaattttttttttttatcggttttggatttattggttgggattttggaaattagattgatagagattaataggaaataagtataataatttaagtaagttttatttgatatcgagtttttataaggaaatgaagatttagagaaatcgttagtttgagcggtttttgttttgttttgagataaagttttattttgtcgtacgtttaggttggagagtagtggttcgattacggtttattgtagttttgattttttgggtttaagttggggtttagttgtcggtttcgggagttgttttgaatttatttttaagttttagtttagatttttaagtagttgggattataggtatgtgttatttcgtttggttaattttttattttttgtagagatagggttttattatgttgttcgggttggttttaaatttttgggttcgagtaatttttttgttttggttttttaaagtgttggggttataggtgtgagttattgtgttcggtttaggtttgaatagtttttatttgttttgtttgttttttaaatttgtttgttgtttgttttgagtagtttttttgtttattttttttgtttgttttttgtttaggttggagtgtagtggtatgatttttgtttattgtaatttttgttttttgggtttaagttatttttatgttttagttttttaagtagttgcgattataggcgtgtgttattatattcggttgatttttgtatttttagtagggatggggttttattatgttggttaggttgttttttaatttttgattttaagtgatttggttattttggttttttaaagtgttgggattgtaggtgtgagttgttgtgtttagtttaggtttgagcgtttttatgttgggtttgatgaagagtggaaagtcgtgggaaattgtgatagagtaataaaagatgagttgaatagtgagttcgtgggggtttcggtaagatttgtgtattggggttttttttagattttttgtttttggagatgaggttgttttttttcgttgggtgtagggagggtattttttacgtgaggggtttatgatttattttagagaaggggtaggttagtgagttttttttggatttgttattttttaaatttttttagttgaaaatatttattatgttaaggtattgtattttggagtgtgcgttttaagttttgttgtttttaattgatcgggtgaggtttatttttattagagtatatagtttgttttatttaggtttttgattgtattttttttttgtttgtttcgagaatatttattagtagtgtttgtggttgtagcgtttattttaagataaatttgtcgggaagtattttgtttttattattatttttatattattttagtatatcgattttggaaataaaagatattattttgtttatagtattttatttttagtagtggtattttttttaaaaaaaaatggtaatttttagttgggtgtggtggtttatgtttgtaattttagtatttgggaaagttgaggtaggttgattatttgaggttaggagttggagattagtttggttaatatggtgaaattttatttttattaaaaatataaaaattagttaggcgtggtggtaggtatttgtaattttagttatttgggaggtcgaggtcggagaattgtttgaattcgggaggtagaggttgtagtgagtcgagatcgcgttattgtattttagtttggacgatagagtaagattttattttaaaaaataaataaataaataaaatttaaaaaaaaatagtaattttcgatcgttgaaaatgttaaattttagagaatatagtatttttataagtgatgttaatattgtttttgattagttgttggttgaagatttatttgatgaatttgatttttttagaatagacgatttagatgattttgttgttttgtttagaaataattgtaggaataatttaaaaaattttttttttttttaatttttttgttttttgagacggattttttttgttgtttaggttggagtgtagtggtacgatttcggtttattgtaatttttgttttttgggtttaagtgattttttagttttagttttttgagtttagttgggattataaggtgtttgttattatacgtggttaattttttgtatttttagtagagacggtgttttattaggttgattaggttagtttcgaatttttgattttaaataattggtttatgtcggttttttaaagcgttgggattataggcgtgagttattacgtttggttagtttttatatttaatttttatatagagtatttagttagatttgttttagttttaaagagcgtgtttatgtaaaattaagtgagtgttggtagtgagttgaattttttaaaaggtaaaagggttaaatattaaatttatttaaaaatatttttatagatatatttagaataatgtttgatcggttatttaggtgttttatagtttagtttagttgatatagaaatttttttttttttttttgagacggagtttcgttttgtcgtttaggttggagtgtagtggcgcgattttggtttattgtaagtttcgttttttaggtttacgttatttttttgttttagtttttcgagtagttgggattataggtgtttattattatattcggttaatttttttttttgtatttttagtagagatggggttttatcgtggttttaattttttgatttcgtgatttattcgttttagttttttaaagtgttgggattataggtatgagttattgcgttcggttgatataggaaattaattattatagttatatagttatcgttattaattttagtatattttattatttttaaaagagattttgtttttattagttaatttttatttttaatttcgggtttttagtttttagttatcgtttatttgttttcgtttttatgaatttatttgttttagatagtttgtataagtggaatcgtatagtatgtggttttggtgtttggttttttttatttggtagaatatttttaaggtttatttatattgtagtaggtgttggtgttttatttttttttatggtcgaataatattttatcgtggatagattatattgtgtatttttttatttgttgatggatatttgggttgtttttgttttttggtataattttgttgtgaagaattttgtagtgagtgttggtttataggtttttgtgtgaatatgtttttattttttttgggtaattgtaagattatgtggtttagttaattagtttttaagttatgtgtttgttgagggatttaggtttggtgggggtgtattgttgtgtttggttagttaggtgttgcgagttcgtgtcgtagttatttttttgtgttgtgttttgaggttgtttcgtcggtatcgggtattgtgagttttaggaggttaaagttttttttgttttattttgagtttaggtttcgttttatgaattaggatgaatggatattgaattaacgtagggatgggtggggttggggtggggacgtagagtgatttcgggggtttgtagttgggttttggttgttgatttttagttttttttgtttgttggagtttagaataagttagaaaggggaaatgtaaagttcgagtgttttttttgtggtagattggtaggtttgggtgggtgagttatttgtagttagttgtagcgtgagagaggaagtgggaggggagggagagggtgagtttggtgtaatttatttttggaaggaggttgggttgaggttgggggaagtgatttttatttttttgagaggatttttttttggggttaattttaaattaagggagataagatttttttgggggaggttggaagtgttggggtttttaggtgggtaggttttttagggttaacgttttggggaagttataagttattatgtttttggattgttatatatatatatatatatatatatatatatatatatatatatatatatatacgagtaaattgtaatataaatgtgtgtttatgaaagtgtttattttaaattattatatagtttgtaaagcgaaggttttggttcgtatttgggtatttattgtttagttagtcggtaggtagtttgtattgtagtttgttattattttttagagatgtagtcgaggagtttagttggtttggagggtttagtgggcgtagttttaggaaagtggttaggttcgggttaggtttttttttttttttagttttgggagaaattattatatgaatgtagttttttttcggagttcgggttggaagggtttgggaggggataggtttttattttaggagtttttaggtttcggttgttgtttgtgttagttgcgtgagcgtgagcgagttaggggttattattgggtggaaggaagaagcgggtattttttttaggaggttatcgttggagttttatagtaggttaattttaggttttgggttttcgggaggaggagaaagaagagaagtaggaggtgtggagggtaggttaggattagaaggtatatagggtcggggtagtgtgggagattttgggggtttttttatttaattagttaatattatagcgtttataagaatacgttattattgtagttttattattttgttttgattttagaaggtataattgatgattttagggaacggagaatttgaggaaggtttcgtaggagagggttagatgcgatcgagtaaatgtgagtcgtttgtaaattgtagagtgtacgtatagtatcggttagttttggggttagtgtttttttggtgtttagttcggtttttgtattttttagtgttcggttgggttttgtgggggttagggttgggtttggtatattagaggatttttattaagtttttggtagtgttttagttattaaatttagtttgttagttattaaattcgttttgtcggttttcgaattattttttcgttggggtcggttatgttacgttaggttttttatgtaggacggtagatggatagacgttgggattaagttatttttgggtcgcgagacgtttgattttttgttggtgttttagaagatgttagtttttcgtggtatgttttttacgcggtgtttggggattagtggtttttaaggggtttttttgttttagcgtggggagtggtttggttaaggttttagtgtttggttggagttaggtataggtttaggtgtattggttggaggttttttgtttatgggttttgtttgttttgtgtttttggtttttattgtgttttttgtgtttttgggagagattttaggggttttgagtttagtattggggttggggagtgggcggggaagagggtggggattagggtttttggttgtagaatagttaggttttaagtttttattttattttttttttatcgggcgttttattttatattgattattttttgaagaaaattttttgaatcggttttttatttcggttgttttaggaagtttatttattttttcgttttaatgttttgtggttttagaaggatggtggaagtcggaaattatgagttttatttataggcggttatatatcgaagtcgcggagacgtcgtgggaaaggattttggttagcgcggtcggtatagagggagcggtgttatcggggtagacgggaatcgtggttgtttttatgttggtttgggagagacgaggggtcggacgaaaggatagtagattggttatttatttatttatttatttatttatttatagcgttttattgggtgtttcggacgtgtaaggttttgtgggtagtgaatgcgatagattttagatagtaatcggagggttacgtgtgtaagaattgagggatttaggttgggcgtggtgttttaagtttgtaattttagtattttgggaggtagaggcgggcggattacgaggttaggagatcgagattattttggttaatacggtgaaatttcgtttttattaaaaatataaaaaattagtcgggcgtggtggcgggcgtttgtaattttagttatttaggaggttgaggtaggagaatggcgtgaattcgggaggtagagtttgtagtgagtttagatagtgttattgtattttagtttgggcgatagagtgagattttattttaaaaaaaataaaataaaataaaataaaataaaaattgaggaatttagtgtagatgagttatttcgggaaaataagtgggagttttaggaatagtatggggaagggatggtttcggtagggaggatttttgtgggtagttttgttggaagagttgaaaggtagttagagaggttgtgcgtggatggaagttgaagagtaggttaggggcgtgtgttttgttaataaagattttaagtatttattgattaggtataatattatgtgttttataaataaatattttatttgatttttagtatttttatgagatagatgttattattttattttatatgtaagaatattgaggtatagagtggttaagttatttgtttagggttatatagtacgtcggtggtaggtaggattttggagttataggaatttggtatattttaggtgtaatggaaattagttacggttttatagagggaaattattagattagtaaattttatatacgttttttggtgttttgaggaggagggattcggataggggtagttaatggtggtggttgtgagatgtgttgggttaatattgatgagagtttgggatggatgagtggattcggagtaatggaaatggagggtttaggttcggtttttggagatttagttgtaatagttgttggttggagaggttgtttatttagatgggggatggggtgggaggtaggtgagatgagagttttagagtttagtttggggtacggttattgggtttaagatgtttttagatgttggggtttgatagtgatagtggttgtagatatttaggatttagtagagggtttggtatagcggggtttagggatacgtttgtgagttaggttggtatttaagtgtgaatttggataaagaaggtggtattgttggtattgaatgtttaggggttgggtgaagttagttagggagaggggtttttaaggtattaggattgatttcgtgggtgagggcggaggaggagacggtagaggttgagagaatagttagagataggaggaaggttagtagagttatgtatagaagtttggagaagatttgaggaaaggaagggttgggtggtcgttattttttgtagttaggaggtaagggtgatttttgtgtgttttattttttagaggattggtggttttatttggttagaattttaagtttagagatgtatttgagttttatgttatggtgtaggtagtaggagttatggagtaggtttgcggggttacggtttgtttgttgttttttggtgtttttattttgagtttaggggttgtttggatgttttgtgttgtatttttttaggcggtgttttagagaggatgaaagtggttattttaaggtgtgattaggtagcggtttatgtatattgtttttttttggggagagtttgggatggaagggtatgtgtgtgtttttgagattttttgaataggttttatgtatttatttatttattttattatttatttatttatttatttatttatttatttacgtatttatttatttatttatttatttatttatttgttaatttatttatttatttatttatttatttatttatttatttatttatagttatttatttatttatttatttatttatttatttatttatttatttatttatttatttgtttatttatttatttatttatttatttatttatttatttatttatttatttatgtatttatttatttatttatttatttatttatttatttatttatttatttatttatttatttatttatttatttatttatttatttatttatttatttatttatttatttatttatttatttgtttatttatttatttatttatttatttatttatttatttatttatttatttaattatttatttatttatttatttatttattattcgtttatttatttatttatttatttatgtatttatttatttatttatttatttatttatttgtttatttatttatttatttatttatttatttatttatttatttatttatttatttatttatttttttatttatttatttatttatttatttatttatttatttatttatttatttattcgtttatttatttatttacgtatttatttatttatttatttatttatttatttatttatttatttatttgtttatttatttatttatttatttatttatttatttatttatttatttatttatttatttatttatttatttatttatttatttattaatttatttatttatttatttatttatttatttatttatttagttatttatttatttgtttatttattcgttaatttatttatttatttgtttgtttatttatttatttatttatttatttatttgtttatttatttatttatttatttatttatttatatatttatatatttatttatttatttaattatttatttttatttttattttagaaagtatttgaagttgttggggtgtgtatttggaaaatgcgttataagtttttataggtttttttttggtttttttatttttttgattggtttttttttcggatatgtaggattttgagtagtttttttgggaggtgggtgtagtttaggtaggttgtttgtaaagttaggatcgagggagttatatttaaggtattgtgggtttttaaggcgatggtattgtgggtttattgtttttagatttttttaatttttaggtttttgagtaggaggatttttggggtagggtttggagacgggaagagaaaataattttagttttttaatttttgttagtttaggtgggtgttgtatggattgggggtatttggaatagttggtttttttattttttttttttatttttttagtttttttggttataattagatagttgtgtgcgatgttttttttttttttgaaggggttatttagttaggtttttatttatggtttaggaatgtgtttttttttgtttgttttttatttttaagtaggtcgtgtttttagttttttgttgtttttgaagggtttgggtatggggtagtttttgtagtatttttagggttcgagttgatttgtatagtagaagggaattgggggaaagttttttttttatttagtatttggtagggggttattttgttgtattttagagatttttgtttaagttttgttattttagatgattttataagttgggggaggcggagttttagtttttatagtttttgttgttgttttattgttgagttttgttgtgtatttgttgataggtttgttgatagtagaaggggttggagagagggaagttttgggttttgttttttttaatttttgtttaggggatatttttgataagaggaaattttagtttgtgatagatggttagtgtttatttatttacgggggaatttttttttttttttgtaagtttgtagatttgttaggaattaaaggaatttttggttgataggttattgtggatatggttggagggttggtacgggttggattttggggttgttttgaggtaggggtcgtttttgttggaaggttttttggggtggggaaggtattagggttattttttgattttttttttgtagtggatttattttagagtttgagataaggtaagggggtagtagaaaatagaatataaaatagttttttttattatatatcgtattagaagttagaggatttatttttggtttgttttttttgtagtttaagttttgagagtggttttttaggaagtgaatggtgatggtttgtaggttagagtttgttttggtttaagattgatgttttaataggtcgcggagtttgggtgaaaaaatttaggttagggaggtggtgggttgtaaatgaaagaatagaggagggttttttttagaaagcggcgggtggtgtgaggagtttttggattttgtttaaatttgattttatcgattggggttaattgaaatcgtgttggtagaaaggtaaaattgtttgagatttttttttttataatagaggagaggtttgtttgaaagggtttggcgagggaaaagttggaggaattttggtcggtagtaaaagtggggattttcgttttttgtttcgggggcgtttcggtttttgaatgaatgaaagaggaggttggatggagatagatttatattatttgttttttttaggttttgtaaaggagtatatagggtttttgttggtttttttattttgttagttattaagaaggagaaaatattaataggggaattgtaaagttgtagttttgtttaagttttatagtggaaatcggaaagagttttagttcggagaaaaatgtagttttttgtttttgtaaattcgtgtttttttttgggaggttagagttattgtgttcgatttttaagtagggttttagagtgttttaggaggggaaggtagagttttagattttcggtattttaggttttaattaggttttgaggagacgttttttgttttatataaagtgtgaagtgtaatttgatttggagttagttaataaattagatgagttgtgtgtattttaaaaatttagtttttgattttttatttatatatatttgtataatttggttatttatatttagtgtttttatttttagaagagaataggaagtttttagtgatatttatggagtgtttgtagtagtttgggtaggttagtaggaatataatgtagtgaaaagtagagttgagatgggaaaatattttgtttttagagttttttagggatgatattttttatcgtttttgtttattcgttttggagtttatttcgtaaatagtaatttgtttttatttgagagtttttttttgtcggagtttagggatggagagtagttggttttagttttttttttttatttttttgttttttagatttattttttattttgaataattgtttttaatttgtttttttttttttttagttgtagaatttagaattttgtgtgtgtggttaaaagtttagagagtgttgtaggtaatgttgagataattttattaaattttgtaagtttttattatattaagtttgtttgttttttttaatttttattttattttattttattttatagggatggggtttcgttacgttgtttaggttggttttgaatttttgggtttaaacgattttttcgtttcggttttttagagtgttaagttatttttttaattgggatttacgggtttagggattttttgatgaatcgtttaaaatacgtgtgtgtttgtttgtttgtttttaatgtatatttttttagggagagtttttattttttattagaggtttgtggtatatatatgttttgtattattgtattagattgtgaattttttatatgttaaagattgttttaaatttgttcggaagtttcggttaataaatatttaaataaatgaattttaaatttttatgtgttattattgtttttattttgattatttttaagtttgtagtgttatttttttgttattgtgaagtagatatttaataaatatttgttaaatgaattaatgttatggttttggtttattaggattttaggattatcgtttattattattgtttatagtttttttattattttgttttagagtagttttttttttgaggtttgtttatttttgtacgtgtgtttagtttttagttttgtcgttttattatttttttttttttatttgtattttttgaattgttaatagttaataatagtttttttttttatttatttatttatatttgaagtgagaagttattattgaggtttttgtggattttgttagtttaatttggggcggttttttggaggtggagtttttagatgagggatggatattttggtgtttgttgggtagatttatttgggagttttggtaggggttttagggtagttttgtttttttattttggttgtgggatttttggtgtattagggttttttaagtaagtatttgtgttttgggagagttataggtaggtttgagagggtttttggaatttgggatttttagttcggtttagtagttggtattattattttttttgtaagggaagttatggaaattaagatgttaatgtgttttgataggtttggggtggttttaagttttgggaagagttttggtaattttttttggttggcgggtagaatttttttttggtagtttagggttttgtttttagttttttgggggagagtaattgagggaggagttggaggttaaggttttagtgttgagttgtttgtatcgtagttgtattttttgggttttggttgtaggaattttatatttttttagtttttttatggttttcgaagatttggtttggggagggggttagtagtttggggtttatttatttggttttaaattttggttttatcgtttattcgttttgcgatttttataattgataaaagttttttcggtttcggtttttttatttgtgaaatgggataataatagtggttattttataggattgtgtgatgatttattagttataatagtttttgagtagcgtttagagtaatatttggggttcggtgtagtggtttatgtttataattttagtattttgggaggttaaggtgggaggatcgtttgaggttaggagtttgaaattagtttgattaatattagtgagatttattttttaaaaaaaaaaattagagtaacgtttggtatagagagtttttagtaaatttcggttgttgtgatgagttttgtttttttatttgtttatttatttattagattttttgtcggggtttgtcgtgagttttacgttgttttgaagaaagtcgggttggggtgagcgtgatggatgaggtgtttggttttataaattttgtgtgggggggttgtggtgagaggaaatcgtatatattattatttagttattatcgtggggagattgtttggacgtagagagtaggttttgtgtgggagcggggagggtaagttttggttgcgaggtagggtttttttaggatttagtagggatttgaaggattttgtaggtatttagggagataggagaggaggagggagtagttttggtcggatattgtttttttagtattgtttgtattagggatttatttagttttaagaagtttttttgtgggggatagggagtatttgttagtttataggatttgaagtgtttttatgggtttaagtttttgggaaggtttgtaggtggtcgtagggttgtcgtaggggtgttggttttagggtttggatttaggggagtttgtagagggagggtagttggaggttgttttagtgtgtattgttacgaggtaaagtaaggagattgttgggtttacgttgggtcggggtggatggaggtaaggaagttttcgtcggggtaagggtattagttgtagatgtcggtagtttttttttggatacgggtttggaaggttgatagggtgtggtgagtgttatcggtttttttgtcgtggtttggttagtggttttataggttttcgtgggtaggaggaggatgattttgtattttgtttggttattattggtagtgatagataaggtgtgtggggatgtggttatttcggttcgtgttttgagagttaggtgtgggttgggtttggggaagataggggaatggtattgatttgattttgagtattttgttttggggtgtaggttcggttgttatttttttggagttgggaatggtattgggcggtggtttagggttttttgttttagcggtattatttttgtatttggttagtaaggttgatgggatttgtgtggatatttttgggacgtagattaggtagtatgatatatagggaggggtaggtagagaagggcggtttttgggttttggtttttaagttaggttttgtaagtttgttgtgttaagttttttttcggtattaggttaggtgggttagggttagttttggggttgtgatgagtgtgagtgtttttaaagtgtgttatgtttaatagttgttttttttttgggtattgttttttagttagatattttatagttttcgttttagttatagatagtaatttgatttttttattttcggtaggttttggggttggggtaagaatttgttattaagtgtagatgtttttagagggtgttggtttagggttgcgtggattatagtttttttatttttgttttagatttatttgtaattttggagaaaagatggtttagtggacgtttgcggggaggagggagttggtttttaggatgagtagatttgggggtagtttttattacgggatcggtgatttattgttattagcgttagtgaatggtagaggggttttggtataaggtttgggtttagaatgggaatttgtagagaaattgttaaggtttttcgttatttgatattttcgtttggttgttattttagaaatatttttgttgtaagaagatgggggagtttgtttggggtatggtttggcgatattaatttgagaattttaggtttaagtgttggtttttgggttttagttgttttttgagttgtaaagttggtttttgggtatttgtggaaaatattggattttttattttattttattttatattttgggatatatgtgtagaacgtgtaggtttgttatataggaatataagtgttatagtggtttgttgtatttattggattttttaatttagttttattagaaatgattgtttttttttttttttttcgttttttttttttttttttttttttttttttttttttttgttttttttttttttttttttttttttttttttttttttttttcgtttttatggggatataatttttatattatattattcgtcgatttagaaagtatagttgagtggtatttttttataattttttataagtattatttttaattttagaacgttttttttattttaaaaggaaacgttattttcggtatatagttatttttttttttttagtttttggaaattattaatttgcgttttgtttttatagatgtatttattttgaatatatgattagaattttaaaagatgtgattttttgtgtttggttttttgtagttggaatgtttttagagtttatttgtgttggcgtacgttcgtgtttttttatggttgagaaatagttcgttgtgttgatttagtacgttgggtttttttacgtatttgttggcggatgtgttagttatttttggagtcgggtgtgttgtgttatttacgggttgtattaggagttggggatattattgagtaagttatagtttcgggtatttaggagttcgtagagtaggagttgggagggaggttaggaggtgtatggtttgtttgttaggttggagagatttgtaaaaagttattttgagttagaaattagagtttgaggtttttgatttttagttgcggagtcgggagggaagttttgtattttgttttgattgtggggtgacgtgttagttattgtttaaattagaatttttttgagagtcgacgtgggtattgttgataattagtttggatattcgaaagaatggaaagtagggatttagatagatttttgtataatcgtgttcgtagtagggcgaggtttggaggtgcgatggggattttaacggggtagttgtcgttttgttggagtttacggtttttggggggggttataggtgttaatcgtatattatataagtaggagtgtgaaattttagggttgttaaatttagtgagggttttgtgttggtttggttatttatagtggtattttaggaaaaaaaattattttatggattttagtttttttattagtaaagagtaggttggattggaattttgtattatttagtatagttgttatttatgaaatgtggttatttaaatttaaataaaaatagaaatttcgttttttagttggattagtttagtgttaagtgtttagaagttatttgtgaatatattgtggtaattttttaaaaaacgaaaattagaattatcgtagtattttataattttatttttgggtgtggatttaaaagaatgtatagtattttaaagagttagagatatttgtatatttatatttatagcggttttgtttatagtagttagcgggtagaaataattcgaatgttcgcggttaaatgaatggagaaattaaaggcgggataggtcgggcgtggtggtttacgtttgtaattttagtattttgggaggtcgaggcgggtggattatttgaggttataagtttaagattagtttgattagtatggagaaatttcgtttttattaaaataaaattagtcgggtatggtggcgggtgtttgtaattttagttatttgagaggttgaggtaggagaattgtttgaatttggggaggtagaggtttcggtgagtcgagatcgcgttattgtattttagtttgggtaataagagtaaaattttgtttaaaaaaaaaaaaaaaaagggtggaatatataaggaatttgatttagtcgtaaagaggaagttaggatatttgtaatagtaagggtgaatttttcgggtattacgttaagtgaaataatttggttataaaaggataattttgtaggattttatttatattaggttcgtagagtagttagatttagaaaaatagtagaatggaggttgttagaggtttgggggatggggttggggagttgtttaatgaggatagtttgttttataagatgaaaaagttttggagatttgttatataataatgcgaatgtatttaatattattggattgtatattttaaaatagtgatcgtggtaaacgttatgataattaaaaggaaaagttacgtggttagtggttattacgttgagtagcgtaggtttcggacggtgtcgtggttatagataatggagtgggtgatttttattattgtttttagttgtttgagtattatggtgttttggggttaggatgaaagtgtttttgggtatgggggtttttgttttttttatttgggagttttgaaggtagattttaaagtttatttggttaggtaggagagcgaggcgggtttttgtattgttttttgcgtgcgtgtttgtttgcgggttagtcggggtttgtaaggtcgtttttcgagggaggggttgtaggaatggtttttatttgtgtagaaggtaagttattgttttacgttaatggtaaagatggggttcggttgcgttgtattattattttttaagcggggtttttggtgggtaggatgtttggtttgatttgagtttttgtagtgagtgttggtgtttgtggagggatttagttgtagttgagtcggtttttttttcgttttgggttttaggggcgttgggggcgagaaaggagagtttagggggtagcgtttttttttaggttttgttggggagggttgagggatgttggggggaggtgggggcgggtaggggttggttttagttttaggtaaaatggtttttagatttataggtagatggaagcgattttcggttacgtgggtggggattgaattgttgtttcgtaaggtaaggttttatgtttggttttaggaagcggttttaaagttatatggtttatggttagatgtagggttgtgtttttgtttatttaaaggttttggaagtttaggggagagtatttttgaagggggagtaggagtaggagtaaagttttgaaggtttttaggttgcgtggtttgggtgggggttacgtgggggtatagagagaggagttttggtttttaggttcgtttgtgggtattgtttttagtagtggagatgtgtggatttttttttggtattttttaataaggaattatattgtttttttgtttttttaattttataagataggaatttttgtgttttgtggaggttgagaagacggggaggtgtttgtgaggataaattagtttttagtttttggtttttagagttttttttttttttatttttgatgttttaggtttggggagttttttttcgatattttttgatcgttttagtgaaataggtcgagagggatggtttgaatcggttggggatgtaggttgtagttagggggtttagtgggtattttttgagttcggtttttgtttcgtaagtggaagggtagttgaattgaagttttttattgttttttttggtttggaagtttgttttttattttttgggtagagtgaggagtgggcgtgggtcgggagggttgttttttgtttgggagggttgtttatttgtttgttacgggggatgagttttttgtagtttttcgtgttgtggttttggtttttacgtcggttttatttttttgtggttgtttttgttgggtgtttatcggttttagggaaaagttatttttttttcggaggattggcgggaggggttttgtttgggagcgtgtcgtgtggtttttgttttagcgtaggatgtttgaggttagattttttttgggaggtaggatggggtaaaagttttttcgtaggtagagtagggtttggatgggtttaagtagggacgggggtatagaatagtagtcgtttagtttgcgtgggagttgagggttattaagggtagttttagtttgtggggattagtagaggtattatttttgtgattagcgagttgtttgtatttgtatgcgtatgtattagtgagtgtggcgagtttgaggtgtgttgggatttggttcgtgtattagttagttttgatgggaattagttttattttgggtatttttggaattttattgtgtgggagtatttgggtttttagtaggcgtttttcgggcgttcgtttttagttttaggtttttgattcgtgtgtggtgttttaatagtagttaggagtagggttatcgaagggatttatagatagaagaggttttagtgatttcgggaagtttagttttacgtgttttatatatttaagagtaaaatttggttttggtttgtgggtgtgtagttcgtgggcgttggttaggtatataagacggtcgtttgggttagtttagggggaggtagatgtggtgtaggggttttttttttttatgagtttaggaatagttttgtatttaggtattcgttttgtatttagtattttttttttttttaggattgttggttcgttttatgggattgaatatataattttatggggatcgacgttggttttattttttttttttataagattatttatggggatgtgggaggcggggatatacgttggttttattttcgttttttataagattattttttttgtgttttggttcgtggatcggtttttaaggtttttgagtggtagtaggcggtatagtttatttgagtagaggtgaaggagagggttaggtttatttgggtggttcgaggtagtgtggagggttaggagaggagagtattttttatttttgtttgagtagttttttagggtacggagataggagtttagggttagttttgttttggagcgtagggggtttttagtttggtatagtttttagaagaggagatgaaaaagtttggttttgggagtttggggatggagttttgttggggaggtagcgtggttgtaggatggtagttttttagaggatattacggttagggatatttattcgggggaatttttaggggtcgtttgggtaagtcgtttagtttttttgagttttagtgttttagtttttttatttaaggatgggtgtgataattatttggtaggcgtttgtgtgtgagtttttgtttcgttttaatttttttgttgttttttttttagttattgaggcggtttttagttgcgttggcgatatggtcgatatttttagagatgtcgggtttaagtaggcgtttgtattacggaacgagaaggtttcggtggatttcggttacgtggggattgattttattttggagtagatgcgtcggaaggttatgaagtagggtttcgagtttaatattatggtggtcggtgagtttttattttgtatgttatttaattaatgtcggaaattagttttagtttttagggcggtttataagtttttgggtttggtttttttttttgtaaaatggggtagtaattttgattttaaggacggattgttagtgatattgcgtgtgtatgtatgcgtttgggaggagtttatagtttttagcggttttttagaggggtttgttttgtatatttagggtttttgagatgattttggggagtttaggtcggtttggagtaggttttgatgagtggtcgttgtttttgagtaatgacgttagtttgtgtagagggttttgtggtagttgtttttttattgttgttttagtttggttttttaggttttttatcgtattttatcgtatttcggttagaggttttttagtagtttagttttagttttgttttggaattggggtttcgtggtttttatattttttggtggtttcggagagttggaggttattacgggaggtcgtcgattagtacgatttgggtagggtgagggggttaggttggagtttatagtgggtcgtttgttgtttttaaagttttttaggttttatttaaattttatagggattttgtgaagggggcgtttcgttttttaggtagaagcgaggtttagggaaggttgttaaggttttttagtttatagggtagagaatcgtagttatcgttttgatttttagaattgtgttttgtttattttacggggtttagggaggggtttggggaagtgttttcgttaggttatattttaaataaaggtgagtttgcggggtttttgtaaggtgtttgggtattttttaggtcgggtttgtttttttgatttttgttagtcgtgtacgttttttttgtttagttttgtggacgtaaatttatatttgttagttcgatatttttttttttttttttgtattgatttgggttttggtttttttggggttttggtgttttttttgttttttgtagttttatgggattcggttgtttatggttttgttgtgtttatagttgtttggaagttggtagtttgttttaagggagggcggaggtgtggggtttttttttacggtttttattttgttttgtttgttgtgggggacgtgtttgtattttgaggatttagggttgtttttcgggaagatggttggagagaaagagaggggagaggtttaaaggtagtggttaggttgggatttatttttgtgggttacggaggggttgttttgttttttagttagggatagggtgagaaggatttgggaatttttgcgttttagttatggtataggttttttttcggagttttggttttaaggagagggagaggtagtttagtagttttcgtttttcgtggttgttattgtgatagttttgttttttgggaatggtgcgtaggaggttattttatttgtttgggttttttcgtttttttaattttgagaagaatagtggttttgattttttataaaattatttttttttagggatgtcgagtgaggaataagacgtggggtagttttgtttttttttttttttttttttatggtagttgtgtttatttgtagaggtgtaggtaaggtggaggggtatttgtttggaggtttatagatttcggggagaattttagttttgttttaatttagcggggtgaggtttgtgtgtttttttttgggttttttttttgtgagttttagttttttcgtttataaaatgggattattttataaagtgagattaagcgagttaggtttcgggtagggtttttaataggttgtggttgttcgagaatttgtagtagtggtgatggtggttgtggtgatgaggatgatgggggtggtaatgacggtgatgatgatggggtgatggtgttagtggagatgatggggatgatggtgatggtggtggtgatagtggtgggatggtagtggtgatgtgggtgatggtgattgtgatggtggtggtggtggtgatggaggtgatggtgatagtgattatgagggtgatggggatggtggtggtggtgatggtgatagtggtgggatggtagtgatgatgtgggtgatggtgatggtggtgatggtggtggtggtgattgtggtggtggtggtgatgatggtggtgatgatggtgattgtggtgatggtgatggtggtaattgtgatggtggtggtggtgatggtggtgatgatggtgattgtggtgatggtggttatgatggtggtaattgtgatggtggtggtgatggtggtgatggggatgatgatggtgattgtgatgggggtggtggtggtgattgtgatggtggtgatgtgggtggtggtggtgattgtgatggtggtgatgtgggtggtggtggtgattgtgatggtggtggtggtggttgtgatggtggtgatgtgggtggtggtggtgattgtgatggtggtgatgtgggtggtggtggtgattgtgatggtggtggcgatggtggttgtgatggtggtgatgtgggtggtggtgattgtgatggttgtgattgtgatggtggtggtggtgatggtgatgatggtggtgattgtgatggtggtgatgggagtgatgttggtgattgtggtggtgaagggggtgatggtggtgattgtgatggtggtgaagggggtgatggtggtgattgtgatggtggtgaagggggtgatggtggtgattgtggtggtggtaatggtgatggtggtaaaggggtgatggtggtgattgtggtgatgtgggtggtggtggtgatgtgggtggtggtggtgattgtgatgggggtgatgatggtaatgtgggtgatggtgattgtggtggtggtggtgatggtgatgattgtgatggtggtgaagggggtgatggtggtgattgtgatggtggtgattgtgatggtgatgtgggtgatggtggtgttgatgggggtgatgatgttagtagtggtggtgatagtgatggggatgatggtggtgttgatggtgatagtggtgggatggtagtggtgatgtggttgatgatggtgttggtgttgatgattgtgatgatagtggtggtggtgatgagggtgacggaagtggtgatgatggcgggagtgatgggatgatggtaatagtagtgatggtattgtgatgatggtgttgatggggatggtggtgatgataagggtgatgatgatggtgatgataataataaaagtaataataataaagggatatattttgtagtattttagttggtattttttagatttaaggtgtcgtggttggaatattgatataatttttgatttgaggttggttaggatatagatttggtggatagagagagatggacgaggagtgttcgtttttgggttattaaatagtttaggttagggatttttagtattagtttttgtttttttaggagtttatattttttttagaaaggtgttattaaagttagaatattagtgtaatttagggtgttttttgtgttgtgtttttttgagatagggttttattgttgtttaggttggagtgtagtggtatggttttgatttattgtagtttttatattttgggtttaagtgattttcgtgttttaggtatgtgttattatatttggttaatttttgtgttttttggtagagatagggttttattatgttggttaagttggtttcgaatttttgattttaagtaatttattttttttagttttttaaagtgttgggattataggcgtgagttatttcgtttggtcgatttttgtttttttaaaagatagggtttttgttattttggagtggtaatgattttagtttattgtagtttcgtatttttgggtttgagtaatttttttattttagttttttgcgtagttgggattataggtgttcgttattatatttagttaatgtttatattttgatgtagagatagggtttttttgtgttgtttaggttggttttgaatttttgggtttaagtaatttttttgttttagttttttaaagtgttgggattataggtatgagttattatatttggtttagggtattttttttggtgtgttgttagcgtagtttaaggtagttttgtgtagggtaaagtaatggggtttcgagtttggaggggtgtgtgtgtgtgtgtgtgtgtgtgtgtgtgtgtgcgcgtacgcgcgcgcgtgttatatgtgatttgtttgtgtgtgttgtgagagttgtgtgtgaggtatgtgtaagaggtatgtttgaggtgagttgtgtgtgtgttgtgagttgtgtatgtgaagtgtgtgtgttgtgaggtgtgtgtatgaggtgtatgtgagttgtgtgtgttgtgttgtatatgaatgttatttttttattttcgtttgttttagttatttgtggattggttgtttgtatatacggttattgtttttcgagtggtattattttgtaggttagcgttttttagtatatggttttatagattttatgggatatgcgtgagtttgtttgatgtttatattagttttacgggggaaggattgtttattttattttgtagattaggaaattgagatacggtgaggttaggtgatttgtttaggttttggtcggttagggaggagtagtttgaatatttgggttttggttgtaattattttggtgaattgtaggaatttcggttatttggtgtattttgggtagttttgggttttttcgttagttcggtttttgttttgtttaaaatttgagttattaggagattttttgtttagaaagtataaggggtataagagatgtcgatttttttaggttcggtttattttttaggagaggattgtggtttgggttgtgttggtattagagttcggttgtgtgggtttatatagttattggatattcggttcgagggtgaagttttcgggggttgtttggtagggatattgtcgggaggtagtttaggtattgttgaattttagattggagagtttcgtgtttgggtgggaggggttttatgtgtagattttgttggttttttcggagagatttttgatcggttttttattttttttttagggtagagcggtttgggtaaatttattttaattaatattttttttaaatttaaaattagtcggaagtcggtgtagtttattttagaggagcgtatttttaagattatcgagattaagtttattacgtacggttagtggtcgggagtgggttgggggtgtaggacgtttttgtttttttggagtataggggttgggggttaagattattatatatagttagtggttaggggcgggttgggggtgtaggatttttttgtttttttggagtatagagtggggggttaagattattatatatagttagtggtcgggagtgggttggggatgtaggacgtttttgtttttttggagtataggggttgggggttaagattattatatacggttagtggttggggatgggttggggatgtgggatatttatgtttttttggagtattggtgcggtgtgagggtgttcgagttaggtaattttaggtttttaagacggggattcgttgtgtttattatttttagtatgttgagtatgttggggttttggttgtgatgggttagtgtttcggatttttgtgggtttcgttatattgagttttttatagataattgagttttttattaaaagtttgataggtaaggggtttttaggggaatcgttatcggtttgtgtcggagttggttgaggaaggttattaatttttcggtgtttttttggttgttatcgttgtttatttggggttgtttcggggttagttaggtgtggggtgtttgtgagggtttttcgttttttttttgattttgcgttcgtggttttgtgtagatattgaggagaaaggcgttcggatgaagttgatagtgattgatatattagggttcggggattatattaataacgagaattggtgaggtttttttagggggaggagtattagcgggggttttagggttttttggattttatttagagttagttttagaggtttttcggttcgcgggggtgtagggtttattttttgggatttgatatgttgttaaagtcgtacgttttaggggtttgaaaattttggattaaagtagaattatttggggaattttgttgtttttaatttattatttgaggttagttcggggaggttggtttgggaggtcgagggtaaggttgtggtattttcgtttagtaagttagattttttagggtatgtattttattggaaggtggggtgttgggttttgagttttgggaatgtacgatttgtttggggagggtattttatgtgtttgttgattcgtttttattttttacgtagttggtagtttattatgaagtttattaatgattagtacgagaaatatttgtaggaggaggttaatattaatcgtaagaagcgtatttcggatattcgcgtttattgttgtttttattttattttcgttatcggttattcgtacgtttttgtagtgtcggcgtttttatgtcgggtgttttgggttttttttgttttttgggattgtaagacggtgttgtttgttttgttgttgggtgtagaggggttgagttaggggttatggtcgttagttatgaagttgggggtgtgttatgtttgtatttttaaagttttatattgatttttatgtaagtgttttgtttagtttttattttttagttgcgttttggggagttgagggttaggtaggttttgggttgttttggagtttggtggtttgtgttttgtttttttaggttaggttttggtaggtggagtgggagtttttagttaagtattcgtagcggtgattgatttttttattcgggttttgttttatgggattttttagagggtttggtgcgtttttagacgggaagtatagagattagtgttggttttttttagggttggacggggttgttgttggtgttggtgagagtttttttttttcgtcggttttgttcgtatttgacgtcgtttttagagattagtaagggcgggaggttgtatgtattttggtaggtggattttttatggttttacggattttttgtttttagttttttgtgtattttttgttagatatttgtggtttattttgagttagggttgggaggaggaggattagaggttagtaggagtggttggtggaggtagtcgtgggtggtttgtttgtatgggtgggtggagaaggtttttcgtatttgttgttttagatgtatttttttgggcggaggaagtttaggggtttggggaaattatattttgtgggtattaggtgtaggaaggagtttggttggtgggtagcgggttttatttagagtttgtgggaaaatttaagtcggagttttcgagtttattttttggtattattttttgtgggttagtaggagttaggggtagggggttagttcgttgtttatgggttttttttgaattgaatatttgtttttttaggtagaacggtttatttgcggttttgtggtagttgttttagttgttttaagttttgttttagttgaggttgatggtaggaggtagaagttttttttgatgttagttgggtaagtcgagggcgggcgggcggtttgtggtatttttgttattttttagtattgattttttggttgggattttagttaggtatgttgtttggtttcgtttaaggcgtttagttttatggggtaggggcgggttttggttatttttgtttaaatttttgttcggagcgggtttttttttagttatgtgtgtgatcgatttatttttattgtgggaaaagttcggttttagaattggggaagatggtgttttagttttagggttttgttagtttttgttatttatagttttttttatattagattttaggtttattggggttaagtaggtaaggggagtagttcgtttggtgtaggggagtagttcgtttggtgtaggggtatcgtatattggtgttagtttttattttttttgtttttttttttttagttaaagttttatagtaagacggttgttgagttaacgatagtttttttgtgtggatatgtaggggtgtggttgggattttagaatttatggacgagggtgtttggagttggttttggttcgtttggtttgtgtagtggtgttatttgtgtttgggatatattcgtgttttttttttgttttatatttatagcgtggtcgattcggttcggggttttgtttttgttagtagggattttcgtgagtttcgagttagtatttgagagtgtcgatatttgtttgggggtgggtgtttttttattgtttcgtttttttagatgagttttacgtatatttttttgttttagttttaggtttttggatatcgagtttatgaaacgtttgagtaaggtggttaatatcgtttttgttatcgttaaggcggatatatttattttggaggagagggtttattttaaatagcgggtagggttttatttttatttgttttagtttttttgtgtaatttggagacgttgtaggtttggtaggggttatttcgtttaaaggagttatattgttagggagatcgaatcgttggttattttttttagcgggtggttggtttggtggtttttggtttaggtggttgttgggggtcgtttttgagatggtttttttagtttttttatattttaaaagtagttttgtgggagtgttaattttttagtagagtttttgaggggggttttggagaagatttggattaggtagatggtgaattttttttttagggagtgaggtcgagtaggggtcgtgcgatatggtttattttgttttatgttttttttttttttttttgagaaagggtttggtttagttgttaaggttgtaatgtagtggtataattatggtttattgtagtttttattttttaggtttagttttcgagtagttggaattatagacgtatattattatgtttggttaatttttgtatttttagtagagacgaggttttgttatgttgtttaggttggtttttaatttttgggtttaagggatttttttgttttagttttttaaagtgttggggttataggtatgagttattttatttcgttttgtttggtttttattagatggaagagaagttgggttaggtgtggtggtttacgtttgtaattttagtattttgggaggtcgaggcgggtagattatttgaggttaggagtttgaggttaatatgatgaaattttatttttattaaaaatataaaaatattagtcgggtatggtggcgggcgtttgtagttttagttatttgggaggttgaggtaggagaattttttgaattcgggaggcggaggttttagtgagtcgagattgagttattgtattttagtttgggtgatagagcgagattttattttaaaaaaaaaaaaaaaaaaaaaagttttaggagggatggtttttgttattttttttttcgttatcgtttgaggtttttgttgtgggatagggaggggtatttaagtaagagggtagttttgggtttttttttttgatagggtagtatattagagttatatggggtgttttttaaaatgaaatcgaggtgtttgggttgcggtattatatttgtttcggtgggtgtgggtggggtttgtaatttatttcgttttggggttaggtgttagggatttttttagtatgtgtaggggaagatagtttatataaagtgggtgtgtttgtcggaggttatatacgggttgtggtttgtgtttgggtaggcgagtagtcgtttattgggatgtttttgttgtacgtatttatgtcgggttgttggtagggagttgagaggttattgtaggcggggtttttgttggaattggggattgtgacgagggttttttaggaagggttttaggaggggaggtttcggtaattttgagtatttttttggggttgtgatgagtaggagaagagaggtgggaggtgtttaggacgatgattttaagtttttggggagttgtagcgtcgtttaggatagtaggtgtatttgtagttgttttttttttttttaggaggtataggagttggaggtgattggtgttatagttttttagagtttgtttttgaattcgagtttggggtagtatatagtgtggaggttatgtggtaaatattagtgggtgggtagagtttgttatagggatgggtttatttttttttttttttattttagattatcgtagatttgttgtttaacggtatcgacgtgtatttttagaaggaatttgatgaggattcggaggatcggttggtgaacgagaagtttcgggtgagtggatttattaggatgttgtttttaggggatttttagtttttgttgaagggtgggttgggggtttggaggattttaagttatgaaattatatttttggggttagagggtattgagtttaggtgtttgtatttagtgttgttaggttgaggttttcgtttttgggggattttaggtttagggtagtttttttcgggggtttaggggagggaattgttttttcgtatatgtgtaattaatatcgtttgttcgttttttaggagatgattttatttgttgtggtgggtagtgattacgagtattaggttaacggtaagaggatttttgggaggaagattaagtggggtattatcgaaggtattcgtcgtaggcgtcggggttttagatagatgggaagatagttttttttgttgatttagagtttgtgggttacgtttgagttagggattcgtggaattttatttattgttttgttttatttagagggaggggtttttttgtttttatttaatttttgggaaagtgagagggtaagtggtttgtgtagatgtttttattttagattttttttcgggtagggaaagatttagggagataggagttgggatgggggtcgttaagttttggattttggtgtaggtttttttataggtatttgtgtggttttggataaatcgtttaatttttttgggtttagaaaaggggtgggttgtagttttgtgagttagatggattttcggttttttattttgttgaagtttttgggatttttatattttagttttttgagtggttgttgtaattaattagtataaacgaggggatttaaaataatataaacgtatttttatagttttagaggttagaggttcgaaattaggggttgtttttttttgaggttttgaggattagttttatttatgtttttttttttttggtggcgtttggtatttttagttgtattgtaaaggtattatatgttttaatttttgttttattgttatagggtttttttttttgtgtttttgtttcgttttttttttttttttttttttttttttttttttgtttgagacggagtttcgttttgttatttaggttggagtgtagtgttgtaattttagtttattgtaatttttgttttttgggtttaagtaatttttttgttttagtttttcgagtatttgggattatagttacgtattatttatttgatttaatttttgtatttttagtagagataggatttcgttatgttggttaggttggttttaaatttttgattttaggtgatttgtttattttgtttggttttttaaagtgttgggattataggaatgagttatcgagtttgtttttttttttttttgtttttggataaggatgtttgtttttggatttagggtttattttaagtggatgattttatttggagatttttaatgaatttataaagaaagacgttttttaagtaaggttataattatgggttttaaggtttggattttgattatgtttttgaatggatgggagtttttggggggttatagtttaatttatttttggcggtgatatttcgggagggatgggttcgaacgttttttttttttttttttttttgtttttttattttttattagaatggaagaggggaaggtgtagagggaaatgtagtaggaaaagttattttgttttgggagagtatttggttgaaaggtttagtagagtaggaagtataagttttttaattttttagggttttagtttttattatttataaagtgggtgtagtgtgttaagattttagtgagttgagagattgttttaaagattatagagttttttgggaagttgttgttttaaaaaaatggttataatgataattattaggaggtattagatatttttgtgttattggttagatatgggttatttcgttttatgttcgaagtttttcgtatttattttttttgtagagttgaagaggtgttgtgagtagaaaatttgttaagggatttagaacgggaggcggttttagaatttatagttttagttttgtattagattttttcgagatgggagtttatgtttggaggagggtgtggagaggtatacgggttttttttttgtttgtattttttttttattattatttttgtcgggtttattttgcgggagttgtttagttgggtgtagtttgggtgttttttagtattcgtttgtggtgttaggttggtttgtttttttttggtttttttgtttgtagtttttttttttttttttgtttaaagagtttttgttgtttaggaaattttttatgaaaggtaggtttgggagagttagggatggatgggtttgggacgggtcggcggttttgttatgggcgtgtttttgttgtattttggtggttaattttgagtatcgtaggtggtcggtgatagaaattgttaggaaatgtataagagagaggttttcgtatttttttgatttgtgcgttgttgagtattattggttttagttgaggaagagtttggaatttgttaggatagttgtgaggtggtggggtttattttttagtagttttatatgaggattttggaaatgtgtttttagtattgttgggtttttatattaggggttttatgagtttatagttgatttgatattcggattagtaagggttgtgttttgtttttgttttttatttggtgaatagtattttgaggtattttttttatttttagaaattattttaagtattgttaatagaaatgtggggtgtaattgattacgttatgaatttatttaatttttatgtttttgagaggcgggtgacgttattatttatattttatggatgaggaaattgagggaatgagagtaatttgttcgagttagggagtggcgattatatattttaattttagtttgagagttttattttttttgtcggttttcgttgttcgttagtgttagatgagagtgttgttggttagtttgtaggaggttttagtgtggatatcgttttatatagggtcgtggtaggagggtttaggtaaaggtaatcggtatagtattgagagtatttgagggttgggtaaggtggaggtttcggttttgtttgttggtttattaagtaaaaattagatatttttaatttggggaaaagttatgtggttttgcgatggggtagtttggagttaggtgtatgggttttgtatttcgttttagttttatgtattgtggagttgagatagatatagtttttgcgttttttatgttttattttttttttttttttttttttttttttttttttttttttttgagacgaagttttatttttttgtttaggttggagtgtcgtggcgtgattttggtttattataatttttattttttgggttttagtgatttttttgttttagttttttgagtagttgggattataggcgtttggtattaggtttggttaatttttgtatttttaatagagacgagattttattatgttggttaggttggtttcgaatttttgatttcgtgatttatttattttagttttttaaagtgttgggattgtagacgtgagtcgtggtgtttagcgtttacgttttattttcgtaagataatggggataataaaggaattataagagatatttgtaggtgtgtgaagacgaagtttattatatgggagggtatcgggtgtttttatttgttttttttgttcggttttttatttttagtgatgtcgtttattgttttttttgttaaaaggttttttgttatataatagttatatatgttaggtatcgcgtgtttatataggagttacgaagtatagtaataaaatgattattttgagatggttattagttcgagttcgagggtatttgtgggtgttcgtggttttttgtttagtttttttgagaagtggttattgtttcgagtttgggtttgtatgtattgtgtgaagtgtatatgtttttgagtaatgtttagtattgttgatttttgagtttgtgaatggtcgtttatagtacgtagtttttgtgtgtgtttttgtgtgtgtgtgttttgagcgtatataaggtggatggggtcgtgggggtaatattttgtgggttataggttttttttaaaattttagtttcgatttttgttttattttatttttagtagtttagttttttgtttgtttttaggtttttgttgggacgttttgttttttttggttattttagtggtgcgggggtttattgttttggtttttttattgtggtttttttttatgtttttatttggtttggttattgtgttattttttattagttaggaattttttggagagtaggagttgagttgtttaggagtaggagttggtgttggttattttagtattttttagattgagggtagtgttaggtgttttatatttagttgtagagtaggtggtttttttgtttttttgtttatggggttgtttttagattttgtttttggtattagtatttttgggtagggggagagaggtggggttcgggtagagtttttttattgggatattaaagttttttttgtttttttttttagttgaaaatattatatattgtgagtttgtttatttgcgggatttttttattaggtgagagatagggtgtttgggtggggttgacggttttatttttaagagggttttatagcgggtgggggtagtgggtgtggggtcgaagttttgggtagagtgggtgttttttgttatttgtttgttttgttttcgggaagattttggaagtttattttttgaaaaagaaaatttattgggaaatgaagtaggtagtgaagattttttttaatttttgcgaagttggttggatgggaaggttgagttttgatttattgtggtttggttcgttagagttgttcggtggttattaagggtttagtgaggttttatgtgtaggttttgtcggtagcgtggggcgtttttagtttcgattttattggtttttgatttttattttttttatttggttgaggtttttttttgttttttttgagtttaggtaaggaggggaagttttgatggagagggtgttgggtgggtggtttttggagtgtgggttttggtttgggtaggtttttttttagtaagtagttggtatggatgatgggaatgttattaagaggaggggtttttaggttggcgggggtaggggtggggggatttcgggagtcgttttgttattgtggggatattgggttttttaatttttttttagattattttttttgagttgtagaggaatgaaaattcgagtttaggattttttttttttggggataagggtaatttagttttttgttttaggttatttgtttgttataggttatagttttggaggtcggtggttatttattgtttttattttgttagtattttggatatcggtttggagtaataatgttttagttttgtttttttgagtttatgtattgtttttgggttttggatttagggttatagggtggatttagagggagatatatgtattggaatatgtgtgttttgatcgagtttgggtttattagggggattgattttttttttaaaacgtgtattagatttggtttaatatggtgggtttgggggattttatggggagttaagtagtcgggatggggagtgggggtgggggtaggcgggtttgagttcgaggtaggtcgagtagggtttttgtttcgttgtttttatttcgttgcgtttattttattgattcgttcgttttttatttttataggacgtatatgtagaatattaaggatattattagtagtatttatttcgaggcgtatcgtgtgaagcgttttaacgagggtagtagcgttatggttaacggtatggaggagaaggagttagaagtttcggagatgtagacgttattttgtttattttcgggattttgtttttaagttattttcgtttttttttaggtttttttattattttattttattttatatgattttttttatttgttatcgttttttattttttcgatatgttgttaggaaataagggaaggggttttttttcgagtgagttagtgatgaggtcgcggttttttcgaggttgtggggaggttgtattggagttataggtaggggtgagagtatttattgaattgatatgattttttgtttttaggtttggtttttcgagggtttagaagagtagtttcggtgtgtagattattcgtttgtgtggggtttttagtgtcggaggttttggggtgggggttaggtttcgtatttgtagaggagtttagtgggttgtacgtttttttttatttttatcggttttgttttttggagtgtgttagagtttaggggagaatgtagtttattaggagtatttggattttttgttcgttatatggtgtggttattatttagtttttatttttgttttgtttttaagggtagaaaattttagggttttttgttatcgattgtttagttattttaagttttttggtagttgttttttttggagtagaaagtgtttttattttagttattcgtagattgtttggttagatgcggggataggttggaatgagggaggcgtttttatttttttgttattttttttttacgttattttcgtttttatcgggttgtaggtgttgttgatgcgttgggatttgattgaggataaaaaggaaggagagatgatttttatttttttattttttagttttgaaaaggtttaagtaagtgagtttggtggaggagttgagggagggagttatggaaggtgttagaaggaaggttggcgggggtacgtgtgggtcgtggtttgggttggttagagtggcgtgagttgttcggcgtttgttttgtttaagtgattagggaagtgtgtgtgtgtttatgtgtatgcgtgttcgtttgtttgtttagtgtttgggtttggtttaagattgggttgtagttatattaatgtttagttagttatttttgttatttattttttttggtttaggttttgttgattttttgagttggggaggtgggaggttaggcgagtttgattttgttgatttattcgtgtttgggtttttttttttagagtttatggtaacgaatttttagaaaggagagaacgggcgttaggggtgtatagtttatagttgaagagtaaggtttcgtggtagtacggttcggttttttattttttgtttttacgaggggatttatgggggttgtttttgtagggtatagatgattaaagtttttttttgttttttgttatttgttttgtttttggggagaaagaggggtttgatgagattttatttaggtgtatatattattaggtgtatttgtaggtatcgggttggttgtttgtagttaggagaaggttagcgagaaggagtgtatgagtgtgagtgtgtgtgtatggaagttggggtattgggcgtttgattttttttttatttaagagaggaaggattttttattatttttattggtgagatagtttattttgttaatttgttatgtttttgttaaaattaagattttgaaggaaatgagtggttagcgttagggtttaggttatgtggtttgtttagttttaatgttatttggtggcggggtggggtgggggtgggtagtagtattttagttttgagatgttttattttttttttttgtaattagattttgaaaaattgttcgttttattaggttttgttttttaatggttttttgttacgtgtttttcgagaaatttgtttttttgtataaatgataaagtgttgaaaatgtattttttgaaataaatgttttaaatgtagaaattta

SEQ ID NO: 5 - DNA, 219909 bp, Artificial Sequence
  chemically treated genomic DNA (Homo sapiens)
tgggtttttgtatttgaaatatttattttaggaaatatatttttaatattttgttatttatataaaaagataaatttttcgggaggtacgtagtaaaaggttattgaggaatagagtttgatgaaacgaataattttttaaagtttggttatagagaaggaaagtgaagtattttaaggttgggatgttgttgtttatttttattttatttcgttattaagtgatattgaggttgggtaggttatatggtttgggttttggcgttggttatttattttttttaaaattttggttttggtaaaaatatggtaagttggtaaagtaaattgttttattagtgggggtggtgaggggtttttttttttttgggtggggagggagttagacgtttagtgttttaatttttatgtatatatatttatatttatatattttttttcgttgatttttttttggttgtaagtagttagttcggtgtttgtagatgtatttggtgatgtgtgtatttgagtggagttttattaggtttttttttttttttaggagtaagataggtaataggaagtaggaagggattttggttatttgtgttttgtaaagatagtttttatgggttttttcgtggggatagagggtgaggggtcgggtcgtgttgttacgaaattttgttttttagttgtggattgtgtatttttgacgttcgtttttttttttttaggggttcgttattatgggttttgaggggaggggtttaggtacgggtagattaatagagttaggttcgtttggttttttatttttttagtttagagagttagtaaggtttgggttaggaagggtgagtggtaggggtggttggttgggtattaatgtaattatagtttagttttgggttaaatttagatattagatagatagacggatacgtatatatatggatatatatatatttttttggttatttgggtagggtaggcgtcgggtagtttacgttattttgattagtttaagttacggtttatacgtgttttcgttaattttttttttggtattttttatggtttttttttttagtttttttattagatttatttgtttagatttttttaaaattgggggatgagggggtaggggttattttttttttttttttatttttaattagattttagcgtattagtagtatttgtagttcggtgggggcgggggtggcgtgagagggggatggtagggagatgaagacgttttttttattttagtttgttttcgtatttggttaagtagtttgcggatggttgagataaaggtattttttgttttaggaggggtagttgttagggggtttggagtggttgggtagtcggtggtaggggattttggagttttttatttttaggagtagggtaggggtaggggttgagtgatggttatattatgtggcgggtagggggtttaggtgtttttggtgggttgtatttttttttgggttttgatatattttaggggatagggtcgatggggatggaggggagcgtgtagtttattgggtttttttgtaagtgcgaggtttggtttttattttaaggttttcggtattgagaattttatatagacggatgatttgtatatcgaagttgtttttttgagttttcggggagttaggtttggggatagagggttatgttaatttagtgggtgtttttatttttgtttgtggttttagtgtagtttttttataatttcggggaggtcgcggttttattattgatttattcggagggaggtttttttttttgttttttggtagtatgtcgaaggggtggggaacgatgataaatggagaaaattatataaaataaaatggggtggtgggagggtttggggggggacggaaatgatttgggggtaggatttcgggggtgggtagggtggcgtttatattttcggggtttttggtttttttttttttatgtcgttggttatggcgttgttgttttcgttgaggcgttttatacggtacgtttcgaagtggatgttgttggtgatgtttttgatgttttgtatgtgcgttttgtgggggtggggggcgggcgggttagtgaggtgggcgtagcggggtgggggtagcggggtaggggttttgttcggtttgtttcggatttaggttcgtttgtttttatttttattttttatttcgattgtttggttttttatggggttttttaggtttattatgttggattagatttggtatacgttttgggggaagggttagtttttttggtaagtttagattcggttagaatatatatattttagtgtatgtgtttttttttgggtttattttatggttttgggtttagggtttagggatagtgtatagatttagagggatagggttggagtattgttgttttaggtcggtgtttagggtgttggtagggtggaagtagtgggtgattatcggtttttaggattatggtttgtggtaggtaggtggtttggggtaaagggttgggttgtttttgtttttaggaaaaaaaagttttgggttcggatttttatttttttgtagtttaggaggaataatttggagggaggttggaaagtttagtatttttataatggtagaacggttttcggaatttttttatttttgttttcgttaatttggaggtttttttttttgataatatttttattatttatgttagttgtttgttgaggaagaatttgtttaggttagggtttatattttagggattatttatttagtattttttttattagggttttttttttttgtttggatttaagggaaataaggagaagttttagttaggtgaaaggggtaggggttagaggttagtgggatcggagttggagacgttttacgttgtcggtagggtttgtatatgaggttttattgggtttttagtggttatcgggtagttttaacgggttagattatagtggattaaagtttagtttttttatttagttaatttcgtaggggttgaaaaggatttttattgtttgttttattttttagtgggtttttttttttagaagatgggtttttaagattttttcgagggtagggtaggtaggtggtagggggtatttattttgtttagggtttcggttttatatttattgtttttattcgttgtagggtttttttaggggtgaagtcgttagttttatttaagtattttgttttttatttgatgagaaggtttcgtaggtaggtaaatttatagtgtgtggtgtttttaattaggagaggagataggaggggttttaatgttttagtggagaaattttgttcggattttatttttttttttttgtttagaaatgttggtgttaaaagtagagtttgagggtagttttatgggtaggagggtaggggaattatttgttttgtagttgagtataggatatttggtattgtttttagtttgggggatattggagtgattagtattagtttttgtttttggatagtttagtttttgttttttagaaagtttttggttaatgggagatggtatagtgattaggttaaataggagtatggaaggaagttatagtggagaagttagggtagtgggttttcgtattattggggtgattagggagagtaggacgttttagtaggggtttgaagataggtagggggttgggttgttgggaatgggatgaagtaggaatcggagttgggattttaaagaaaatttgtggtttatagggtgttatttttacggttttatttattttgtgtgcgtttagagtatatatatatagggatatatataggggttacgtattgtggacgattatttataagtttaagaattagtaatgttaaatattgtttagggatatgtgtattttatataatatatataagtttaagttcgggatagtggttattttttagggagattgggtaggagattacgggtatttataagtgttttcgggttcgagttggtggttattttagagtggttattttattgttgtgtttcgtaatttttatatgaatacgcggtgtttggtatgtgtaattgttatataatagaaggttttttaataaggagggtagtgaacggtattattggaggtggggagtcgggtagggaaggtaaataaagatattcggtgtttttttatgtgatgaatttcgtttttatatatttgtaagtgttttttgtgatttttttgttatttttattattttacgaaaatggggcgtagacgttgggtattacggtttacgtttgtaattttagtattttgggaggttgaggtgggtggattacgaggttaggagttcgagattagtttggttaatatgatgaaatttcgtttttgttaaaaatataaaaattagttaggtttggtattaggcgtttgtaattttagttatttaggaggttgaggtaggagaattattggaatttaggaggtggaggttgtggtgagttaagattacgttacggtattttagtttgggtaaaagagtgaaatttcgttttaaaaaaaaaaaaaaagaaaaagaaaaagaaaagaaaagaaaatgaggtatagagaacgtaagaattgtgtttgttttagttttatagtgtataaggttggagcgggatgtagaatttatatatttggttttaggttgttttatcgtagagttatatggtttttttttaagttaaaaatgtttagtttttatttggtaggttagtaggtagggtcggggtttttattttgtttagtttttaagtgtttttagtgttatgtcggttgtttttgtttaggtttttttgttacggttttgtgtagggcggtgtttatattagaattttttgtagattgattagtagtatttttatttaatattgacgggtagcgagagtcggtaggaagaatggggtttttaggttggagttggagtgtgtgatcgttattttttggttcgggtaagttatttttatttttttagtttttttatttataaaatgtggataataacgttattcgttttttagggatatgaggattaaatgagtttatggcgtgattaattatattttatatttttattgataatatttggggtggtttttaaggatgggaaagatattttaagatgttgtttattaagtgggaggtaagaataaggtatagtttttattagttcgggtgttaggttagttatgaatttatggggtttttgatataaaaatttagtagtgttgaaggtatatttttagggtttttatataagattgttggaaagtgggttttattattttataattgttttgataggttttagatttttttttagttggagttagtggtgtttaataacgtataggttagagaggtgcggggattttttttttgtgtattttttgatagtttttgttatcggttatttgcggtatttaaggttggttattagggtgtagtagaggtacgtttatagtaaagtcgtcggttcgttttaggtttatttatttttaatttttttaaatttgttttttataaaaagttttttaaatagtaagaattttttgggtagagaggaagagaggaattgtaggtagaggggttaaggggaggtaagttagtttgatattataggcggatattggaaaatatttaggttgtatttagttgggtagttttcgtagggtgggttcggtaggggtggtggtaggggaggagtgtagataggggaaaggttcgtgtgtttttttatatttttttttaggtatgaatttttatttcgagggagtttggtgtagggttggagttgtagattttagagtcgtttttcgttttgggttttttggtaggttttttgtttatagtatttttttaattttgtaaggagggtgggtgcggggagtttcggatatgaaacgagataatttatgtttagttagtggtataggagtgtttgatgttttttggtaattgttattatgattatttttttagagtaatagttttttaaaaagttttgtggtttttgggatagttttttaatttattaaaattttggtatattgtatttattttgtggatgatgaaaattgaggttttggaagattaagagatttgtgttttttgttttattgggttttttagttaagtgtttttttagaataaagtggttttttttgttgtatttttttttgtattttttttttttttattttaatgagaaatgaagggatagagagaggaaggggaaggaaacgttcgggtttatttttttcggggtgttatcgttaggagtgggttgaattgtggttttttaggggtttttatttatttaaagatatggttaaggtttaggttttggaatttatgattgtgattttatttggaaaacgtttttttttatagatttattaaggatttttaaatgggattatttatttagggtaggttttaagtttaaagataggtatttttgtttaaagataagaaggaaagagggtaggttcggtggtttatttttgtaattttagtattttgggaggttaagtaaggtgggtagattatttgaggttaggagtttaagattagtttggttaatatggcgaaattttgtttttattaaaaatataaaaattaagttaggtgggtggtacgtgattgtaattttagatattcgggaggttgaggtaggagaattatttgaatttaggaggtagaggttgtagtgagttgagattgtaatattgtattttagtttgggtgatagaacgagatttcgttttaaataaaaaaaaaaaaaaaaaaaaaggaagaggagggacgggatagagatatagggaagaaggttttgtgataatggggtagagattagagtatgtgatgtttttataatataattaggaatgttaggcgttattagaaggaggaaggtatggatgaggttggtttttagggttttagaaggaaatagtttttgatttcggatttttggtttttggaattgtgaaaatacgtttgtgttgttttaagttttttcgtttgtgttaattggttataatagttatttaagagattaaggtgtgagggttttaggaattttagtagggtaaggggtcgagggtttatttggtttatagagttatagtttattttttttttaggtttagagaggttgggcgatttgtttagggttatataggtgtttatgaaagagtttgtattaggatttagaatttggcggtttttattttagtttttgtttttttgaatttttttttgttcggggggaggtttggggtggaggtatttgtataggttatttgtttttttatttttttaagggttgaatggggataaggagatttttttttttgggtggggtaaggtagtggatgaggttttacgagtttttggtttaggcgtggtttataggttttgggttagtagaagagattgtttttttatttgtttggagtttcggcgtttgcggcgagtattttcgatggtattttatttggttttttttttaaggatttttttgtcgttgatttggtattcgtggttattgtttattatagtaaatgggattattttttggggaacgggtagacggtattggttatatatgtgcgggaaggtaatttttttttttgggttttcgggaggagttgttttgagtttggggttttttaaaaacgagagttttagtttgatagtattgggtatagatatttgggtttagtgttttttggttttaagaatataattttatggtttaaggttttttaaatttttaatttattttttagtaggaattgggggttttttgggaataatattttagtggatttatttattcggaatttttcgtttattagtcggtttttcgagtttttattaaattttttttgggggtatacgtcgatgtcgttggatagtaggtttgcggtgatttgggataaggagggagagagatgggtttatttttgtggtaagttttatttatttattggtgtttgttatatgatttttatattgtgtgttgttttaggttcgggtttaagggtaggttttggggggttgtgatattaattatttttaatttttgtgttttttggagggaagaggggtagttgtaggtgtatttgttgttttgagcgacgttgtaattttttaggggtttaaggttatcgttttgagtattttttatttttttttttttgtttattatagttttaagaaagtatttagggttatcgagatttttttttttgaaattttttttaaaaaattttcgttatagtttttagttttagtaggggtttcgtttgtagtaattttttagttttttgttagtagttcgatatgggtacgtgtaatagaaatattttagtgagcggttgttcgtttgtttaggtatagattatagttcgtgtgtagttttcggtagatatatttattttgtgtggattgtttttttttgtatatgttgggaaggtttttgatatttggttttaggacggagtaggttataggttttatttatatttatcgaggtagatgtggtgtcgtagtttaggtatttcggttttattttgaaaggtattttatgtggttttgatgtgttgttttgttaggaggaagagtttagggttgtttttttgtttggatgtttttttttattttatagtaggggttttagacggtggcggagaagaaggtggtagagattattttttttgaaatttttttttttttttttttttttgagatggagtttcgttttgttatttaggttggagtgtagtggtttaatttcggtttattgaagttttcgtttttcgggtttaagagatttttttgttttagttttttaagtagttgggattataggcgttcgttattatgttcgattaatatttttgtatttttagtagagatggggttttattatgttggttttaaatttttgattttaagtgatttgttcgtttcggttttttaaagtgttgggattataggcgtgagttattatatttggtttagttttttttttatttaataaaaattaggtagggcgaggtgaggtggtttatgtttgtaattttagtattttgggaggttgaggtaggaggattttttgagtttaagggttagagattagtttgggtaatatggtaaaatttcgtttttattaaaaatataaaaattagttagatatggtggtgtgcgtttgtaattttagttattcggggattgagtttgggaggtggaggttgtagtgagttatgattgtgttattatattgtaattttggtaattgagttagatttttttttaaaaaaaaaaagggggggtataaaataaggtgggttatgtcgtacggtttttgttcggttttattttttggaagagagatttattatttgtttggtttaggttttttttaaaattttttttagagattttgttggagaattggtatttttataaagttgtttttgagatatgggggagttggagaggttattttagggacggtttttagtagttatttgggttagggattattaggttagttattcgttggggagagtgattagcggttcggtttttttgatagtgtgatttttttagacggggtggtttttgttaggtttgtagcgtttttaggttgtatagaagggttggggtaagtagagatggaattttattcgttgtttgaagtggatttttttttttagggtgagtgtgttcgttttggcgatgatagggacgatgttgattattttgtttaggcgttttataaattcgatgtttaggggtttgaggttgaagtagagggatgtgcgtgaggtttatttgggggagcggggtagtgggggggtatttatttttaagtaggtgtcgatatttttaggtgttggttcggggtttacgggggtttttgttggtaaggatagggtttcgggtcgagtcggttacgttgtgagtgtggggtagaggaaggatacgggtgtgttttagatataggtgatattattgtataggttaggcgggttagggttagttttaagtattttcgtttatgagttttggggttttaattatatttttatatgtttatatagaagggttgtcgttggtttagtagtcgttttgttgtggggttttggttgggaggggagaggtaagagaaatagaagttagtattagtgtgcggtgtttttgtattaggcgggttgtttttttgtattaggcgggttgttttttttgtttgtttggttttagtgagtttggggtttgatgtggggaaagttgtgggtggtaggggttggtagggttttggaattggggtattattttttttagttttggagtcgagttttttttatagtgagaataaatcggttatatatatggttggggagaagttcgtttcgggtagaagtttaagtagagatggttaaggttcgtttttgttttatgggattggacgttttgggcgggattaggtaatatgtttagttggagttttagttaaagggttagtgttggggagtggtagaagtgttatagatcgttcgttcgttttcggtttgtttagttggtattaggagaggtttttgttttttgttattagttttagttgaggtaaagtttggagtagttggaatagttgttataggatcgtaggtgagtcgttttgtttgggagggtagatgtttagtttaggagaggtttatggatagcgggttggttttttgtttttgatttttgttggtttatagaggatgatgttagagggtgggttcgaaaatttcggtttgggtttttttatagattttgggtgaggttcgttgtttattagttaggtttttttttgtatttggtgtttatagagtatggtttttttaaatttttgggtttttttcgtttagggaagtatatttgggatagtaggtgcgaaggattttttttatttatttatgtagataagttatttacggttgtttttattagttatttttgttggtttttggtttttttttttttagttttggtttagggtgagttataggtgtttggtagggggtgtatagggagttgaggatagagggttcgtgaggttatgaagagtttatttgttagggtatatgtagtttttcgtttttgttgatttttaggggcgacgttaggtgcggatagagtcggcgggaggaaagggtttttattaatattaatagtagtttcgtttagttttggaaggggttagtattgatttttgtgtttttcgtttaagaacgtattaaattttttaaggggttttatgaggtagggttcggatgagaaggttagttatcgttacgggtgtttggttgggggtttttattttatttgttagagtttggtttgagaaggtaggatatagattattaggttttagaatagtttagggtttgtttgatttttagttttttaagacgtagttgaaggatgggggttgggtaggatatttgtataggggttagtgtgaggttttggaggtgtagatatggtatatttttaattttatagttggcggttatggtttttgatttagtttttttgtatttagtagtagggtagatagtatcgttttgtagttttaggggatagagggaatttagggtattcggtatgaggacgtcgatattgtagggacgtacgagtggtcggtggcggggatgaagtagaggtagtagtggacgcgggtgttcgggatgcgttttttgcggttgatgttgatttttttttgtaggtatttttcgtattggttattgatgaattttatgatgggttgttagttgcgtgggggatggggacgagttagtaggtatatgagatgttttttttaagtaggtcgtgtatttttaggatttagagtttaatattttattttttaatgaaatgtatgttttgggaggtttggtttgttgagcggagatgttatagttttattttcggttttttaaattagttttttcgggttggttttaggtgatgagttggggatagtaagattttttaggtaattttgttttggtttagaatttttaggtttttgagacgtgcggttttggtagtatgttaggttttaggaggtgggttttgtattttcgcgggtcgggaaatttttagggttgattttgggtggggtttagggagttttgaagttttcgttagtgtttttttttttggaggggttttattagttttcgttgttgatgtggttttcgaattttggtgtgttaattattgttagttttattcggacgtttttttttttaatatttgtatagagttacggacgtagagttagaggggagacggaagatttttatagatattttatatttgattgatttcggggtaattttaggtaggtagcgatgataattaaggagatatcgggaaattaatggttttttttagttaatttcggtataggtcggtgacggtttttttgggagttttttgtttgttagatttttggtggaaaatttagttgtttgtggggagtttagtgtgacggggtttataggggttcgggatattgatttattatagttagagttttaatatgtttaatatgttggggatggtgggtatagcgagttttcgttttggggatttgggattgtttgattcgggtatttttatatcgtattagtgttttaggaaggtatgggtattttatatttttagtttatttttagttattgatcgtgtgtgatggttttgatttttaatttttgtgttttaggaaggtaggggcgttttgtatttttagtttattttcggttattgattgtgtgtgatggttttgattttttattttgtgttttaggaaggtagaggagttttgtatttttagttcgtttttggttattgattgtgtgtgatggttttgatttttaatttttgtgttttaggaaggtaggggcgttttgtatttttagtttattttcggttattgatcgtgcgtgatggatttgatttcgatggttttggggatgcgtttttttgaggtgggttgtatcgattttcggttgattttggatttgaagagggtgttgattaaggtggatttatttaagtcgttttgttttggggagaggatgggaggtcggttaggggttttttcggagagattagtagggtttgtatatggggttttttttatttaggtacgaggttttttagtttgagatttagtagtgtttgggttatttttcggtaatatttttgttaagtagttttcgaggattttattttcgagtcgggtgtttagtgattgtgtaaatttatatagtcgggttttgatgttagtataatttaggttatagtttttttttgagaggtgagtcgggtttgggagagtcggtattttttgtgttttttgtgttttttggataggaggttttttggtggtttagattttggataggatagaggtcgggttggcggaggagtttagggttgtttagggtgtattaggtggtcgggatttttgtagtttattagggtggttgtaattaaagtttaggtgtttaaattgtttttttttgatcggttagggtttgggtaagttatttgattttatcgtgttttagttttttgatttgtaaaatgggataaatagtttttttttcgtggagttggtgtgagtattaggtaggtttacgtatgttttatggggtttgtggggttatgtgttagggggcgttggtttgtagggtggtgttattcgagggatagtgatcgtgtgtgtagatagttagtttataggtgattgagataaacgaggatgaggaagtagtatttatatgtaatataatatatataatttatatatattttatatatatattttataatatatatattttatatgtataatttataatatatatataatttattttaaatatattttttatatatattttatatataatttttataatatatataaataaattatatataatacgcgcgcgcgtgcgcgtatatatatatatatatatatatatatatatatatttttttagattcggagttttattgttttattttgtatagagttgttttgggttacgttagtaatatattaaaaaaaatattttaggttaggtgtggtggtttatgtttgtagttttagtattttgggaggttgaggtaggaggattgtttgagtttaggagtttaagattagtttgggtaatatagagagattttgtttttatattaaaatgtaaatattggttaggtgtagtggcgagtatttatagttttagttacgtaggaggttgaagtaggagaattgtttaagtttaggagtgcgaggttgtagtgagttaggattattgttattttagagtgatagagattttgttttttaaaaaaataaaaatcggttaggcgagatggtttacgtttgtaattttagtattttgggaggttgaggagggtggattatttgaggttaggagttcgagattagtttggttaatatggtgaaattttgtttttattaaaaaatataaaaattagttaggtatggtggtatatgtttgaggtacgagaattatttgaatttaggatgtggaggttgtagtgagttaagattatgttattgtattttagtttgggtaataatgagattttgttttaaaaaaatataatataaaaaatattttaaattatattgatgttttgattttgataatatttttttaggaaaagtgtgggtttttgggaggatagaggttggtgttgggaatttttggtttgaattgtttagtagtttaaggacggatatttttcgtttatttttttttgtttattaggtttgtgttttggttaattttaggttaggagttatgttaatgttttagttacgatattttagatttaggagatgttaattgggatattgtaaggtgtatttttttattattgttatttttattattattattattattattattatttttattattattattatttttattagtattattattataatattattattgttattattattattttattattttcgttattattattattttcgttatttttattattattattattgttattataattattagtattagtattattattaattatattattattattattttattattattattattaatattattattatttttattattattattattattattaatattattatttttattaatattattattatttatattattattataattattattattataattattattattattttttttattattattataattattattattattattattattataattattattatttatattattattattatttttattataattattattattatttatattattattattatttatattattataattattattattatttttttattattattattattattattattataattattattattattttttttattattattataattattattattattttttttattattattataattattattattattttttttattattataattattagtattatttttattattattattataattattattattattattattattattattattattataattataattattataattattattatttatattattattattataattattatcgttattattattataattattattattatttatattattattattataattattattattatttatattattattattataattattattattattattataattattattattatttatattattattattataattattattattatttatattattattattataattattattattatttttattataattattattattatttttattattattattattattattattataattattattattataattattattattataattattattattattattattattattattattattataattattattattattattattataattattattattattattattattattattattattataattattattattattattattattattattattatttatattattattattattttattattgttattattattattattattatttttattatttttatgattattattattattatttttattattattattattattattataattattattatttatattattattattattttattattattattattattattattattatttttattatttttattagtattattattttattattattatcgttattattatttttattatttttattattataattattattattattgttgtaaattttcgaataattataatttgttggggattttgttcggggtttagttcgtttgattttattttatgggatgattttattttatggacgaggaagttaaggtttatagaggaggagtttaggggaagatatataagttttatttcgttgagttaggataaagttgggatttttttcggggtttgtggatttttaaataggtgtttttttattttgtttgtatttttgtaggtgggtatagttgttatgggagggaggagggaggagagtagagttgttttacgttttgttttttattcggtatttttgggagggagtgattttgtggggaattaggattattgttttttttagggttgaaagggcgaagaggtttagataggtgaagtggttttttgcgtattatttttagagggtaaggttgttatagtggtagttacggaaggcgagggttgttgggttgtttttttttttttttggggttaaagtttcggaagaaggtttgtgttatggttgggacgtagaggtttttaggttttttttattttgtttttggttagggagtagggtagttttttcgtagtttatagagatgagttttagtttggttattgtttttgggttttttttttttttttttttttagttattttttcgggaggtagttttgaatttttagggtataagtacgttttttataataggtagaatagggtgggggtcgtaggaggggattttatattttcgtttttttttgaagtaggttgttagtttttaggtagttgtgagtatagtagggttatgagtagtcgggttttatgaggttataggaagtagagaggatattaagattttaggggagttagggtttagattagtgtagaagaggaaagaaaggtgtcgggttggtaggtgtgggtttgcgtttatagagttgggtaggaaggacgtgtacggttggtaaaggttagagaaataggttcggtttgagaggtgtttagatattttgtagaaatttcgtaagtttatttttgtttagggtgtgatttggcgggggtatttttttagatttttttttggatttcgtggagtgggtagaatatagttttgggagttaaaacggtggttgcggttttttgttttgtgagttaaggaattttggtagttttttttgagtttcgtttttgtttggaaaacgggacgttttttttatagggtttttgtgaggtttgaatgggatttggggggttttggaaataataggcggtttattgtagattttagtttggtttttttattttgtttaggtcgtgttgatcgacgatttttcgtggtgatttttagtttttcggggttattagggggtgtggaagttacgaggttttaattttagggtagagttgaagttgagttgttgggaagtttttggtcggggtgcggtggggtgcggtggggagtttggagggttaggttggagtaatagtgaggggatagttgttatagaattttttgtataagttgacgttattgtttagaggtagcgattatttattaggatttgttttaggtcggtttgggttttttaaagttattttaggggttttggatgtgtaggataggtttttttgaggagtcgttggaggttgtgggttttttttaggcgtatgtatgtatacgtaatgttattggtaattcgtttttgaggttagggttgttgttttattttatagaagggaagattaagtttaaaggtttgtgggtcgttttgggggttgaggttggttttcggtattggttgagtggtatgtaaggtgaggatttatcgattattatgatgttgaattcgaagttttgttttatggtttttcggcgtatttgttttaggatggagttaatttttacgtagtcgaagtttatcggggttttttcgtttcgtgatgtaggcgtttgtttgagttcggtatttttgggggtgtcggttatgtcgttaacgtagttgggagtcgttttagtggttggggaaggaatagtagaggagttagagcggaataggggtttatatataggcgtttgttaggtggttgttatatttatttttggatggggaaattgaggtattgaggtttagaaaggttaagcgatttgtttaggcgatttttgagaattttttcgggtggatgtttttggtcgtggtgttttttaaaaagttgttattttgtagttacgttgtttttttagtaaagttttatttttagatttttaaggttaggtttttttatttttttttttaggagttgtgttaagttgggggttttttgcgttttaaggtagggttgattttgaatttttgttttcgtattttggagggttgtttagataagggtggagggtgttttttttttttggttttttatattgtttcgggttatttaggtggatttggtttttttttttatttttatttagataagttgtatcgtttgttgttatttaaaggttttagaagtcgatttacgagttaagatataggagggatggttttgtaagaaacggggatagaattagcgtgtgttttcgttttttatatttttatggatggttttgtaagaaagggggatagaattagcgtcggtttttatggagttgtgtgtttaattttatagaacgagttagtagttttgggagaaggaaaagtgttgggtgtagggcgggtgtttggatgtagagttgtttttgggtttatggaggaggggggtttttgtattatatttgtttttttttggattgatttaggcggtcgttttgtgtgtttggttagcgtttacgggttgtatatttataggttaagattaagttttatttttgggtatgtggggtacgtggagttgaatttttcgaaattattaaagttttttttgtttgtaggttttttcgatggttttgtttttggttgttgttaagatattatatacgggttagaggtttggggttgggggcggacgttcggaagacgtttgttgaggatttaggtgtttttatatagtggggttttaggggtatttaggatggggttggtttttattagggttggttggtatacgggttaggttttagtatattttagattcgttatatttattggtgtatgcgtatgtaggtgtagataattcgttggttatagaggtggtgtttttgttagtttttataggttggagttgtttttggtggtttttagtttttacgtaggttgggcggttgttgttttgtgttttcgtttttgtttgggtttatttaggttttgttttgtttgcggggagatttttgttttattttgttttttagggaggatttggttttaggtattttgcgttaagatagggattatacggtacgtttttaggtagggtttttttcgttagtttttcgggaggggagtggtttttttttgggatcggtgggtatttagtaggggtagttataggggagtggagtcggcgtgggagttagggttatagtacgggaggttgtagggggtttatttttcgtgataggtaagtgagtagtttttttagataggaggtagttttttcggtttacgtttattttttattttgtttagaaggtgggaggtaggtttttaggttaggaggggtagtgggagattttagtttaattgtttttttatttgcggggtaagaatcgaatttaggaaatgtttattgagttttttggttgtagtttgtatttttagtcgatttaagttatttttttcggtttattttattggagcggttagagggtgtcggagggaggttttttaggtttgaggtattagaggtgagagaggaaaagattttggaagttagaaattgggggttggtttatttttataggtattttttcgtttttttagtttttatagggtataggaatttttattttatggaattgggggaataaaggaataatataattttttgttgggaaatgttaagggggggtttatatatttttattgttgagagtaatatttataggcggatttggaggttagggtttttttttttgtgtttttacgtggtttttatttaggttacgtagtttggaagtttttagggttttgtttttgtttttgttttttttttagaaatatttttttttgggtttttaggatttttaaataaataaagatatagttttgtatttggttatggattatgtggttttggggtcgttttttgaagttagatatggggttttgttttgcggggtagtagtttagtttttatttacgtgatcgaaaatcgtttttatttgtttgtgggtttgagagttattttgtttgggattgggattagtttttattcgtttttatttttttttagtattttttaattttttttagtaggatttggggggaggcgttgttttttgaatttttttttttcgtttttaacgtttttggagtttagagcgagggaggggtcggtttagttgtagttgggtttttttataggtattagtatttattgtagaaatttaaattaaattaaatattttgtttattaggggtttcgtttgagaaataataatataacgtagtcgagttttatttttgttattgacgtagggtagtggtttgttttttgtataggtgagagttatttttgtaatttttttttcgagaggcggttttgtaggtttcggttggttcgtaggtaggtacgtacgtagagagtaatgtaagagttcgtttcgtttttttatttggttaggtgagttttggggtttgtttttaggatttttaagtgggaaaagtagagatttttatatttagagatatttttattttggttttaggatattatggtgtttagatagttggaaataatggtaaagattatttattttattgtttgtgattacgatatcgttcgaggtttgcgttgtttagcgtggtagttattggttacgtgatttttttttttaattgttataacgtttgttacggttattattttgaagtgtgtagtttagtggtgttaagtatattcgtattgttgtgtaataaatttttagaatttttttattttgtaaaataaattgtttttattaaataattttttagttttattttttaagtttttggtaatttttattttgttgtttttttgaatttgattattttacggatttggtataagtggaattttataggattgtttttttgtgattaaattattttatttagcgtaatattcgaaaggtttatttttgttgttgtaggtattttaattttttttttacggttgagttaaattttttgtatgttttattttttttttttttttttttagatagagttttgtttttgttgtttaggttggagtgtaatggcgcgatttcggtttatcgaaatttttgtttttttaggtttaagtaatttttttgttttagttttttaagtagttgggattataggtattcgttattatgttcggttaattttgttttagtagagacggggtttttttatgttggttaggttggttttgaatttgtgattttagatgatttattcgtttcggttttttaaagtgttgagattataggcgtgagttattacgttcggtttgtttcgtttttgatttttttatttatttgatcgcgggtattcgggttgtttttattcgttggttattgtgaatagagtcgttatgaatgtgggtgtataaatatttttagttttttaagatgttgtgtatttttttgaatttatatttagaagtggaattatgggatgttacggtggttttagttttcgttttttgaggaattgttatagtgtgtttataagtgatttttgagtatttgatattgagttagtttaattgaggaacggaatttttatttttatttaaatttaaatagttatattttataaatggtaattatattggatggtatagaattttagtttaatttattttttattaatggggaaattgaggtttatagagtgatttttttttttgaaatgttattgtaagtggttaggttagtataagatttttattgaatttggtaattttgaaattttatatttttgtttgtatgatatgcggttaatatttgtgattttttttaaagatcgtgggttttagtaagacggtagttgtttcgttgagatttttatcgtatttttaggtttcgttttgttacgaatacggttgtgtaaggatttgtttgggtttttgttttttattttttcgggtatttagattaattattagtagtatttacgtcgatttttagaaaggttttgatttggatagtaattgatacgttattttatagttaaagtaaaatgtagagtttttttttcggtttcgtagttgggagttagaggttttaggttttggtttttggtttaaagtgattttttgtaagtttttttagtttggtaaataggttatgtattttttgattttttttttagtttttgttttgcgagtttttgggtgttcgaggttgtggtttatttagtgatatttttagtttttagtgtagttcgtgagtagtataatatattcggttttagaaataattaatatattcgttaatagatgcgtggagaaatttaacgtgttgagttaatatagcggattattttttagttataaaaaggtacgagcgtgcgttaatatagatgaattttgaaaatattttaattgtaagaaattaagtataaaaagttatattttttagggttttagttatatgtttagaataagtatatttgtagggataaagcgtagattggtgatttttaggggttgggggagggggagtgattgtgtatcgaggatggcgtttttttttggggtgaggaaaacgttttggaattagaggtgatgtttatagaaggttgtgaaaaaatgttatttaattgtgttttttgaatcggcggatggtgtaatatggaaattatatttttatgaggacgggagaggaagggaaagaagggaaggagggagggggaaggaaatagggaaggaaggaaaaaagggaggggaggagggagggacggaagaagggaaagaaggtagttatttttagtggagttggattgaagagtttaatgggtgtagtaaattattatggtatttgtatttttatgtaataaatttgtacgttttgtatatgtattttagaatgtaaagtaaaataaaataaagagtttagtgttttttataagtgtttaggagttagttttatagtttagaggatagttgaggtttagaggttaatatttaggtttgaggtttttaagttggtgtcgttagattatgttttagataaatttttttatttttttgtagtaagggtgtttttagggtggtagttaggcggaggtgttaggtggcgggagattttgatagtttttttgtaggtttttattttgaatttaggttttatgttagggtttttttgttatttattggcgttggtggtagtaggttatcggtttcgtgatggggattgtttttaaatttgtttattttggggattagttttttttttttcgtaggcgtttattgggttattttttttttagagttgtaggtgggtttaaggtagggatgaaagggttgtaatttacgtagttttgagttagtattttttgggaatatttgtatttagtgataaatttttattttaattttaggatttgtcgaggatgagggaattagattgttgtttgtggttgggacgggggttgtaggatatttggttgggaggtagtgtttagagaggaggtagttattggatatgatatattttaggggtatttatatttattatagttttagggttgattttggtttatttggtttggtgtcgagagagggtttgatatagtaggtttgtaaagtttgatttggaaattaagatttaggggtcgtttttttttgtttatttttttttgtgtgttatgttgtttggtttacgttttagaaatgtttatataagttttattagttttgttggttaaatgtagagatggtgtcgttggggtaagggattttgagttatcgtttaatgttatttttagttttaggggagtgatagtcgggtttgtattttaggataaagtgtttagggttaagttaatgttatttttttgttttttttaaatttaatttatatttggtttttagagtacggatcgaaatggttatatttttatatattttgtttgttattgttaatggtggttaagtagaatgtaaggttattttttttttgtttacggaggtttgtgaagttattgattaggttacggtaggggagtcggtggtatttattatattttgttagttttttaggttcgtgtttaggagaaagttgtcggtatttatagttggtgtttttgtttcggcgaagatttttttgtttttatttatttcggtttagcgtgggtttagtagtttttttattttgtttcgtaataatgtatattggagtagtttttagttgttttttttttgtaggtttttttgaatttagattttggggttagtatttttgcggtagttttacggttatttgtaggtttttttagaaatttgagtttatgggggtattttaggttttataaattaatagatgttttttgttttttataaaggggttttttaaagttgagtgagtttttgatgtaggtaatgttaggaggatagtgttcggttagggttgtttttttttttttttttatttttttgggtgtttgtaaagttttttagatttttgttgaattttggggaagttttgtttcgtaattagggtttgtttttttcgtttttatatagagtttgttttttgcgtttagatagtttttttacgatggtaattgaataatgatgtgtgcggtttttttttattataatttttttatatagggtttgtgaagttagatattttatttattacgtttattttagttcggttttttttagagtagcgtagggtttacggtaagtttcggtaaaaagtttggtgaatgaatgaataaatgaagaaataaagtttattatagtagtcgaggtttattgggggttttttgtgttaggcgttattttaatttttttttttagagagtgggttttattaatgttggttaggttggttttaaatttttggttttaagcgatttttttattttggttttttaaagtgttgggattatagatataagttattgtatcgagttttaggtgttattttaaacgttgtttaggagttattataattgatggattattatataattttataaggtagttattgttattgttttattttatagataaggaaatcgagatcgagagggtttttgttaattatgagggtcgtaaagcgagtaagcggtagagttaggatttgaagttaggtaggtgagttttaggttgttgattttttttttaggttaggttttcgggaattatggaaaggttggagaagtatggggtttttgtagttaggatttagaaggtgtagttgcggtgtaggtagtttagtattgaggttttggtttttagttttttttttagttgtttttttttagggagttggaggtagagttttgaattgttaggagaagattttattcgttagttagggaaagttgttagggttttttttagggtttagagttattttaggtttattaaagtatattagtattttagtttttataattttttttgtaagaaagatgatggtattagttattgggtcgggttgggggttttagattttaggggtttttttaggtttgtttatggtttttttaggatatagatgtttatttgagaaattttagtgtattaggggttttatagttaaaataaagaggtagagttgttttggggtttttgttaaagtttttaggtagatttatttagtagatattaaaatgtttattttttatttgaaaattttatttttaggaggtcgttttaggttgggttgataaaatttatagagattttaatgatgattttttattttaggtatgagtgagtgggtggagggagaagttattgttaattattaatagtttaggaaatgtaggtaaaggaaagagaatggtaaggcgatagggttggaaattagatatacgtgtagaggtgagtagattttagagaaagaattgttttggaataagatggtaaagaaattatagataataatggtagacgatgattttggggttttagtggattaggattataatattgatttatttgataagtatttattgagtgtttattttatagtaataaaaagatgatattataggtttgagagtagttagaatgaaaatagtggtggtatatgggaatttgaagtttatttatttaaatgtttattagtcgagattttcggatagatttgaagtagtttttaatatgtaaggaatttataatttgatatagtagtataggatatgtgtgtgttataaatttttggtgaaaagtaaagattttttttagaaaagtatatattgaagatagatagatagatatatacgtattttgaacggtttattaaagaatttttaggttcgtggattttagttaaaaaaataatttggtattttgggaggtcgaggcgggaggatcgtttgagtttaggagtttaagattagtttgggtaacgtagcgagattttatttttataaaatgaaataaaataaaatgagaattaaaaaaaataaataaatttggtgtgatgagaatttatagaatttaatagggttattttagtattatttgtagtattttttaaatttttgattatatatataaagttttgggttttatagttagagaagagggagagtaggttaaaaataattatttaaggtggaagatgagtttgagaaataaagaggtaagaggagaagattgaggttagttgttttttatttttgagtttcggtaggaggaagtttttaagtgagaataagttgttgtttgcggagtggattttagagcgggtggatagagacgataaggaatgttatttttggggggttttgaaaataggatatttttttattttaattttgttttttattgtattgtgtttttattgatttatttaagttattataaatattttataaatgttattggggattttttgtttttttttaaagatggaaatattgaatataaatgattaaattgtgtaaatgtgtgtgggtgggggattaaggattgaatttttaaaatgtatatagtttatttaatttgttaattaattttaaattaaattatattttatattttgtatgggataggaagcgtttttttaaagtttggttaggatttgggatgtcggaaatttgagattttgttttttttttttgagatattttgaaattttgtttagaaatcgagtataatggttttggttttttagagaaagatacggatttgtaaaggtaaagagttgtattttttttcgagttggagtttttttcggtttttattatggggtttaaataaaattgtagttttatagtttttttgttggtgtttttttttttttggtgattaataaggtggaagagttaataagaattttgtgtgtttttttgtaggatttggaagggataggtggtgtgagtttgtttttatttagtttttttttttatttatttaggggtcgaggcgttttcgaggtagggggcgggggtttttatttttattgtcggttaaggtttttttagtttttttttcgttaaatttttttaagtaaattttttttttattgtggaggaaggaattttaagtagttttgtttttttgttagtacggttttaattggttttagtcggtaaagttaaatttggataaggtttaagggttttttatattattcgtcgttttttggaagaggtttttttttgtttttttatttgtaatttattatttttttagtttgagtttttttatttaggtttcgcggtttattgagatattaattttgggttagagtaagttttgatttgtaaattattattatttattttttaaagagttatttttagaatttaggttgtagggagggtaggttaaggatgaattttttgatttttggtgcggtgtgtggtggggggggttattttatattttgttttttgttgtttttttgttttgttttaggttttgaagtggatttattgtagagggagggttagggaatggttttgatgttttttttattttaaggaattttttagtaggagcggtttttattttaaagtaattttaagatttagttcgtgttagttttttagttatgtttatagtggtttgttaattagagatttttttagtttttggtaaatttgtaaatttataaagagaaagaaaagttttttcgtgggtgggtggatattggttatttgttataggttggaatttttttttattagggatgttttttaagtaggggttggggagggtagggtttagagtttttttttttttagttttttttgttattagtagatttgttagtagatatatagtagagtttagtagtgaggtaataataggggttgtgggggttggggtttcgttttttttaatttatgaaattatttgaaataataaaatttagataagggtttttggggtgtaatagggtggttttttgttaggtgttgggtagaaaaaaagtttttttttaatttttttttgttgtgtagattagttcgggttttggggatgttgtagaggttgttttatgtttaggttttttagagatagtagggggttggaggtacggtttgtttgggggtaggggataggtagggaggggtatatttttgggttatgagtaggagtttgattaaatgatttttttaggagggagaaagatatcgtatataattgtttgattatagttagaggggttggaaaggtgggggaaaggggtgaaggggttaattgttttaggtgtttttaatttatgtagtatttatttggattgataagagttgagagattggaattgtttttttttttcgtttttaggttttgttttaggagtttttttgtttaggagtttgggagttgaggaggtttggaagtagtgggtttatagtgttatcgttttgggaatttatagtgttttggatgtggttttttcggttttagttttgtaggtagtttatttggattgtatttattttttagaagagttgtttagaattttgtatgttcgaaagaaagattaattaaagaagtgaggaagttaaagagaggtttatgaaagtttatgacgtattttttaagtgtatattttagtaattttaaatgttttttgaagtaaggatggggatggatggttggataaatggatgggtgtatgggtgtgtgaatgggtgagtgggtgggtggatggatggatagatggatgaatggatgggtaggtggatgaataggtaggtgaatggatgggttggcggatgaatgagtaaatggatgaatgattggatggatgggtggatgagtagataggtggatgagtgaattggtggatgagtggatagatggatgagtggatgagtagatgagtgaatgggtggatgagtggatgggtgggtgagtggatgagtagataagtggatgggtggatgagtggatgggtagatggatgggtgagtggatgcgtggatgagtggatggacggatgagtggatggatggataagtggatgggtagatgagtggatggatagatgagaggatgggtagatggatgggtgagtggatgggtgggtgagtagatgggtggataagtggatggatagatgagtggatgggtggatgagtggatggatatatgggtggatagatgggtgagtggacggatgatgagtggatgggtggatgagtggatggttgagtggatggataaatgggtgaatgagtggatgggtagatgagtggatggatagatgagtgaatgagtggatgggtggatgagtggatggatagatgggtgaatgagtggatgggtggatgagtgaatgagtgaatgagtggataggtggatgagtggatgggtggatgagtgtatagatagatgggtggatgggtggatgagtggatgggtgggtgagtggatgggtaggtggatgagtggatggatagatgggtaaatgagtggatgggtggatgagtgaatgattgtagataggtggatgagtggatgggtgaatgagtggatagatgggttgataggtggatgagtggatgggtggatgggtgggtgcgtggatgggtgagtgagtggatgggtgggtgggtggtaagatgggtggataggtatatggagtttatttaaggagttttagaaatatatatatatttttttattttagattttttttaggaaaaagtagtgtgtatggatcgttatttggttatattttgagatagttatttttattttttttggaatatcgtttggggggatgtagtatagggtatttaagtaatttttgagtttagggtagagatattaggaagtagtaggtaggtcgtgatttcgtaggtttgttttatggtttttgttgtttgtattatggtatgaagtttagatgtatttttggatttggggttttgattagatggagttattaattttttgaagaatgaaatatataggggttatttttgttttttagttgtagggaatgacgattatttagttttttttttttttaaattttttttaggtttttgtgtatggttttgttgattttttttttgtttttggttatttttttagtttttgtcgttttttttttcgtttttatttacggagttagttttggtgttttgagagtttttttttttagttgattttatttagtttttgagtatttaatgttaataatgttattttttttgtttagatttatatttgagtgttagtttgatttatagacgtgtttttgggtttcgttgtgttaggttttttgttgggttttgggtatttgtagttattgttattgttaagttttaatatttgaaggtattttgaatttaatgatcgtgttttaggttgaattttggagtttttattttatttgttttttattttattttttatttaagtgaatagtttttttagttaatagttattgtagttagatttttaggggtcgggtttgggttttttatttttattatttcgaatttatttatttattttaaatttttattaatgttaatttaatatattttatagttattattattagttgtttttgttcgaattttttttttttaaagtattagggggcgtgtgtaaaatttattaatttgatgatttttttttatgaagtcgtgattggtttttattgtatttgggatatattagatttttgtggttttagaattttgtttattatcgacgtgttgtgtgattttgagtaagtaatttaattattttgtgttttaatgtttttatatgtgaaatgggataataatatttgttttataagaatgttggggattaaatgagatatttatttatgaagtatatagtgttgtgtttggttagtaaatgtttgaagtttttgttaataaaatatacgtttttaatttattttttagtttttatttacgtatagtttttttggttgttttttagtttttttaataaggttatttatagaggttttttttgtcgggattattttttttttatgttgtttttagaatttttatttgttttttcgggatagtttatttatattgggttttttagtttttgttttgttttgttttgttttgttttttttgagatggagttttattttgtcgtttaggttggagtgtagtggtattatttgggtttattgtaagttttgtttttcgggtttacgttatttttttgttttagttttttgagtagttgggattataggcgttcgttattacgttcggttaattttttatatttttagtagaaacggggttttatcgtgttagttaggatggtttcgattttttgatttcgtaattcgttcgtttttgttttttaaagtgttgagattataggtttgagatattacgtttagtttaggttttttagtttttatatacgtggtttttcgattgttgtttggggtttgtcgtatttattatttataaaattttatacgttcgaagtatttagtaagacgttgtgaatgagtgaatgaataaatgaatgaatggttagtttgttgttttttcgttcggtttttcgttttttttagattagtatgggggtagttacggttttcgtttatttcggtaatatcgttttttttgtgtcggtcgcgttggttagagtttttttttacggcgttttcgcggtttcggtgtgtggtcgtttgtgaatgagatttatgattttcggtttttattatttttttggagttataaagtattaaggcggaaggatggatgggttttttgggatagtcggggtgggaggtcggtttaggaaattttttttaggaaatggttagtgtgggatgaggcgttcggtgggaggggagtggagtggggatttggggtttggttgttttgtagttagggattttaatttttattttttttttcgtttattttttaattttagtgttgggtttagggtttttggggttttttttaggaatatagaagatatagtaaggattagggatataggataggtagagtttatgggtaggaggtttttagttagtatatttgagtttatgtttggttttaattagatattgagattttggttaggttattttttacgttgaggtaggggggttttttagaggttattggtttttaagtatcgcgtggaagatatgttacggagagttagtattttttgagatattagtagaaggttagacgtttcgcggtttaaggatgatttggttttagcgtttatttatttgtcgttttgtatgaaaagtttgacgtgatatggtcggttttagcggaagagtgattcgggaatcggtagagcggatttagtaattggtaaattggatttagtaattgagatattgttaggggtttggtagaagttttttaatgtattagatttagttttgatttttatagagtttagtcgagtattaaaaggtgtagaggtcgagttgagtattaggggaatattgattttagggttgatcggtgttgtgcgtgtattttatagtttatagacggtttatatttattcgatcgtatttgatttttttttgcgaggttttttttagatttttcgttttttaaagttattagttgtgttttttgaaattagagtaaagtaataaaattgtagtaatagcgtgtttttatgaacgttgtgatgttagttggttaaatgagggagtttttagggttttttatattgtttcgattttgtgtgttttttggttttggtttattttttatattttttgttttttttttttttttttttttcgaggatttagggtttggggttgatttattgtgggattttaacggtgattttttggaagaaatgttcgttttttttttttatttagtagtgatttttggttcgtttacgtttacgtagttaatataggtagtagtcggaatttggaagtttttggggtgggagtttgtttttttttaggtttttttagttcgaatttcgggaaggagttatatttatatggtaattttttttaaggttgggagggggaaggggtttggttcgggtttgattatttttttgaggttgcgtttattgggttttttaagttagttgggtttttcggttgtatttttgagggatggtaatagattatagtgtaaattgtttatcggttggttgggtagtgggtgtttagatgcgggttagggttttcgttttataggttgtgtggtggtttaaagtgggtatttttatgggtatatatttgtgttatagtttattcgtgtgtgtgtgtgtgtgtgtgtgtgtgtgtgtgtgtgtgtgtgtgtgtgtgtgatagtttagaaatatggtaatttatagtttttttaagacgttggttttgggagatttgtttatttgggggttttagtatttttagttttttttaggaaggttttgttttttttggtttgaagttggttttagggaagaatttttttagaaaaataaaagttattttttttagttttagtttagtttttttttaggggtgagttatattaaatttattttttttttttttttttatttttttttttacgttgtaattagttgtaagtggtttatttatttaggtttgttagtttattatagaaaagatattcgaattttgtattttttttttttgatttgttttgggttttaataggtaaaggaaattggaagttagtagttaggatttagttgtaggttttcggggttattttgcgtttttattttagttttatttatttttgcgttgatttaatgtttatttattttagtttatggagcgaggtttggatttaagataaaataaagggggttttggttttttggggtttatagtgttcggtgtcggcgagataattttagagtatagtatagagaaatggttgcgatacggattcgtagtatttggttggttaagtatagtaatgtatttttattaggtttgggttttttagtagatatatggtttaaaggttggttggttaaattatatgattttgtaattatttaagagaaatgaaaatatgtttatataaaaatttgtagattagtatttattgtagaattttttataatagaattatgttaaaaagtagaaataatttaaatgtttattagtagatgaagagatatatagtgtggtttatttacgatggaatattattcggttatgaaaaagaatgaagtattagtatttgttataatgtggatgagttttgaaaatattttattaagtgaaaggagttagatattaaggttatatattgtacgattttatttatataaattatttagaataggtgaatttatagagacgaaggtagatgagcggtggttaggggttgagagttcggagttgggaatggggattggttaatgggggtagggttttttttggggatgatgaaatgtgttgggattaatggcgatggttgtgtaattgtgatggttaattttttgtgttagtcgggcgtagtggtttatgtttgtaattttagtattttgggaggttgaggcgggtggattacgaggttaggagattgagattacggtgaaattttatttttattaaaaatataaaaaaaaaaattagtcgggtgtggtggtgggtatttgtagttttagttattcgggaggttgaggtaggagaatggcgtgaatttgggaggcgaagtttgtagtgagttaagatcgcgttattgtattttagtttgggcgatagagcgagatttcgttttaaaaaaaaaaaaaaaaatttttgtgttaattggattgggttatggggtatttaggtaatcggttaaatattattttgagtgtgtttgtgaaggtgtttttggatgagtttaatatttaatttttttattttttagaaagtttagtttattgttagtatttatttaattttatataaatacgttttttgaggttgaagtaaatttgattggatgttttgtgtgaaaattaaatataaaaattggttaggcgtggtggtttacgtttgtaattttagcgttttgggaagtcgatatgggttaattatttgaggttaggggttcgagattagtttggttaatttggtgaaatatcgtttttattaaaaatataaaaaattagttacgtgtggtggtaggtattttgtaattttagttaaatttaggaggttaagattggagaattatttgaatttaggaggtagaggttgtagtaagtcgagatcgtgttattgtattttagtttgggtaatagagagagttcgttttaaaaaataaaaaaattaaaaagaaaaaaaattttttaaattgtttttgtagttatttttaagtaaaataatagagttatttgagtcgtttattttggaaaaattagatttattaaatgaatttttagttaataattgattaagaataatgttaatattatttgtaggaatgttgtgttttttaggatttgatatttttagcgatcgagaattattatttttttttaaattttatttatttatttattttttgagatggaattttgttttgtcgtttaggttggaatgtaatggcgcgatttcggtttattgtaatttttgtttttcgggtttaagtaatttttcggtttcggttttttaagtagttgggattataggtgtttattattacgtttggttaatttttgtatttttagtagagatgggattttattatgttggttaggttggtttttaatttttggttttaggtgattagtttgttttagtttttttaagtgttaggattataggtatgagttattatatttagttgagaattattatttttttttaaaggaaatattattattaaaaatggaatgttataaatagaatgatgttttttgtttttaaagtcgatatattagagtgatgtgaaaataataataaaagtaagatatttttcggtaaatttattttggggtgaacgttgtagttataagtattgttggtgagtattttcggggtaaataggaaaagggtgtaattaggagtttgggtaaagtagattgtgtgttttgatgggggtgggttttattcgattagttgaaggtaatagggtttggaacgtatattttaagatatagtgttttggtatagtaaatatttttagttgaaggaatttaagaaatggtaggtttaagaagaatttattgatttgttttttttttgaagtagattataagttttttacgtaagaggtgttttttttatatttagcggaaaggaatagttttatttttagagatagaggatttgagaggggttttagtatataggttttgtcgagatttttacgggtttattgtttagtttattttttgttgttttgttatagttttttacgattttttattttttattaaatttagtataaaaacgtttaggtttaggttaggtatagtagtttatatttataattttagtattttggaaggttaaggtggttagattatttgaggttaggagttgaagaatagtttggttaatatggtaaaattttatttttattaaaaatataaaaattagtcgggtgtggtggtatacgtttgtagtcgtagttatttgggaggttgaggtatgagaatggtttgaatttaggagatagaggttgtagtgagtagagattatgttattgtattttagtttgggtaaaagataagtaaaagaaataaataaaaaaattgtttaaaataagtaataaataaatttaaaaaataagtaaaataaataaaaattgtttaggtttaggtcgggtatagtggtttatatttgtaattttagtattttgggaggttaaggtaggaggattgttcgagtttaggagtttgagattagttcgggtaatatagtgggattttgtttttataaaaaataaaaaattagttaggcggggtggtatatgtttgtagttttagttatttgggagtttgagttgggatttaagagtgggtttagagtagttttcggggtcggtagttgggttttagtttgagtttaggaagttaaggttgtagtgagtcgtgatcgggttattgttttttagtttggacgtgcgatagagtgagattttgttttaaaataaaataaaaatcgtttaggttaacggtttttttgggtttttatttttttatgaaggttcggtgttaagtaaaatttatttgaattgttatgtttgttttttgttaatttttgttagtttaatttttagggttttagttaatgaatttaaaatcgatagaaggaaagggtttttttttagattttgttttgattaggtttttgtaattttgtgataaaggtttgaaggtttgaataggaggatataaggtttgagtgagagagaatttttttcgtttaatcgtttttaatttggaatattagattttttttgttttagatttaaattgatatatgcgttttttttgggtttcgggattggaacgacgttattggtttttttgggttttgggtttttaggtggatattagagtcgtaatatgggttttttcgtgtttttagtttgttgatttattttgttaattttggtatttgttaatttttgtaatgaggtgagttaattttttataataataaatttttttatttaaatatacgtatatattttttattggttttgtttttttggatgattttaatataattattttgtgaatatagtaaaattattgaattgtagattttaaaaaggttaacgttatagtatgtgaattttatttttataaagttattatttaaatagtaataagaagttggtgagttttgtgtatttttttgtaaataagagtagggatagcgtcgtttttgttttcggatgtttttagtttttagttcgagtttaggaatattttttatgtgtttttttttttaattttgtagtttaagggtgggggcggtttttagtttggtattttttttgtagttttttattttttttttatattagttaatggatatagaggtttttttatggatttttatttttatttatttatttttatttttttgagatagagttttattttgtcgtttaggttggagtgtagtggtgtgatttcggtttattgtaattttcgttttttggatttgagtgatttttttgttttagtttttcgagtaattgggattataggtacgtgttattatatttagttaattttttgtatttttattagaggtagggtttttttatgttggttaggttggtttcgaatttttgattttaggtgatttattcgttttagttttttaaagtgttgggattagaggtgtgagttattaagtttagtttttttatagatttttaaaagggttttgggtaatatagattgggatttgttaagttattaaatgatttttttaaataaagaaggaagttataaatttttatttaaaaggagtgggggatggtaatagaaatatagttagttagaagtcggaagggttttatttaatttatttttaaggtttttgggtagaagggataagggaaaatttgttttttaaatattttattcggtattttatttttcggatgtaagatgtagttgtgtatagcggtagtagtgaggattttggtttggtaggtttttatattttttgttgagggttttaggggttagggttgtttaataggattaagaggaaatgattataggagtttttagttgttgggggtggttttcgcggttttttgggttatttttggtgaatttattttaaatttggaagaggtttaagttttttcgtttttcgtattttaaattttagttacgttagttaggagttttgggggatgagaaaaaatttaattaagttttattgtgttgggtgatataggatttagaaggagaggggtttttggattgtttaagtttaatgataattttagtagttgggtttttaagttaattagtttttttttttttagtagttttcggggagtattacggtgagttgtgaggagttagtttagtacggtatatataacgtaggggttttttcgtatttttattttataaatattagggtttttcgggggattagttttttatttttgagttattttttttttatcgtttttttaataaggaatagagaaggagtttttattgtttaattagatgtagaaattgacgtacgtatagagaggttacgtgtgatatggtttggacgttgttttttttaaattttatgttgaaatgtgatttttgatgttggaggtaaggtttggggggggtggggtttgggttatgggggtggattttttatggatggtttggtgttttttttacggttataaagttcgggagatttgattgttatagagtttgggagggttgggtgaggtggtttatatttgtaattttagtattttgggaggttaaggtgggtggattataaggttaggagtttgggattagttcgattaatatggtgaaattttatttttagtaaaaatataaaaaaattagtcgggcgcggtggtatgcgtttgtaattttagttatttaggaggttgaggttgtagtgagtcgaggattgtgttattgtattttagtttggttgatatagcgagattttattttaaaaaaaaaaagagtttgggagttttttttttcgttatgtgacgtgttagttttttttttattttttattatgaggaaaagttttttggggtttttttagaagttaagtagatgttggtattatttgtatagtttgtagaatcgtgagttaaataattttttagtttcggttattttttatagtaatttaaaatggacgaatataatgtattagtttttttttttggattttatagtgtgtttggttggggttgtgttttggggaaatggtaattgcgaggtttttatagatcgggttcgggttttaattatagtcgtattttagcgttttgatattgttgagtggatgtttaaaaagtattgttgggtgaatgtgcgagtgaatgatgaagatggaggtggttgttggtgttagggtaaggttttaggagtttggggaggtggtattaggtagtttaggttaacggttaattttggatagggttaggaggtagttagaatggttaaggatagttaagggattttaggtaagtggttttattttttttaggcgggtaggaagtaggaattagattaaggggtgttaggtggtagtggtatttagggggtttgaggagtaggtgtaggtttagtagggttggtggtgttacgtgtggggtcgatcgtggtttcgtttattgtttttattttttggacgtatgggtttatggtttttaaggtttttttttgtttttacgtttatttttttaggttttatttttagacgttaagttatttttttatttttatttttttcgttgtttttatatttgagttgattttttttttgagttttggtgaaattttagagagtttagaggtgtagtttatatttttgcgttataaggtttttgtagtttttatttttttgggatattttattttagagttgggtgtgtatttattttattggattagaaattttaggaatgtttattttgtatgtttttgttttttatttttcgttcgttatttagttcgtggttgttatgtggttgggttttggtagttatcgtagttggtaatatataattagtatttttgtgtttaggtttcgtgttgagtttttttagttttattttcgtttgtttttaaaatggtttttgatatggtaattattattatttattttttagataaaagattatagttttaggagaggaggaatggtaggtttgaggttacgtggttcgtaataggtaaatggattcggtagttattttattttcgagtggggtttttttttgtttgtagatttcgttgaggttttagagtttggagttagtgagtttttattgagtataaggatagcggcggtgtcggggttggaataaggtagggaggggttttttaaattatagttttggttgtggatttattttgggatttcgttttggttgggaattttgttttagtttattcgggatatttttttattttgagttttgtattgggttgtgtacggggtttgttgaatgagtgagggtaggagggatggtgagtagggtggaaagcgattatggtgggtaggtttttgttggaagtttgaaatatttttggcgagtaggaaaatattaggggaagaggttatagtttttagaagggttcgttggggattgttttgtagtttttttatcgggataggtagaaaatttagtttttttttagggtgagtttaggaagtttgtgggggtataggttttagttagggtggcgcgtgggtttatttaggggacgttgtcgtggtttagagttaggttaaattttatgtattttgtaaataattatttataataaataaggtttatttattttttaagaagagtaaaatattataggaggtatttttttattaattaaatacgttatagtgattttattgcgttattgagggagggtattagggtgttcggtttagagtaaattgtggttagggggacgggtatattgttaaatcggttagatttttatttttgaaaatgtgggttaaattttttttaataagttataaggaaatttagtgtgaattttatgtttttattattatcggttgttttggaagattgggaggaggggttttgttttttttttatttttggttatagggtttgaggttataatttggattgggattttaattttttttttggggaagaggtttatttagggtgtttgttaaggtttagcgtataaatacggaattcgtttaacgtttgtttcggtatttttgggttttttatattgggtttttttatttgattttttaagtagtgagagtgatgggatatggggcgtttttaggggagatttggggagatggagtaagttttttagtttaaggtgaggtttcgaggtatggtttatgtagtgatgttttttacgggaggtttgaggtatgattaggagtttggagatttagtagaggtttgggtatgggattttcggtacgtagttagagcgagggtcgaggttgtatggatgtaagtaggtgattttgtgttatcgggtgttatttgtgtcgggttttgtgtagtcgtttttattttattgagttttagggaggtgaggtaattattttaggtatatagtttcgggggtaaaggttggatttaggtgtgtttgattttagaatttaagaagataagtagaggagtttgagttttttgagatcgtagtgatggtttagtgttttaggatggttaggttggtttttgtagttttagttaatcgtgtttttttttagttatttagggttttagcgttggtttttgagatttggtattggttataggggtttatttttggttgtggatatttagtgttggttattgggatttggtattggtcgtggggatttgtttttggttgtggggatttagcgttggtttttgagatttggtattggttatggggattcgtttttggttgtgggtattcggtgttggtttttgagatttggtattggttatgggggttcgtttttggttgtgggtattcggtgttggtttttgagatttggtattggttatggaggtttgtttttggttgtgggtattcggtgttggtttttgagatttggtattggtcgtgggggtttatttttggttgtagggatttagtattgtttatggggtttgtttttggtttcggggagttagtagtgtttgtggggtttatatttggtggtggggatttggtgttggaggattttgatagtaaaattatagaggcgataggtaatagtaatttattagtatagcgtgtggtttgttttagttacggtatttttttttattttgtgtttttttattataaagtttagtgtaggtaacgaagttaagaggtggagaattcgtaggaggacgtatattatatttgtttttcgtgtggcgtttttgtattttgggtggttgagattttttgttttttttttaggttttttcgtgttaggtttgcgttgttttttttggtttcggtttttatttattcggttttttagttatagatagtagcgatttttttttttatttaatggggttattgtttagtttattattagtttttagggttggtagatgatatcggttacgggtagtgtttttttcggttttagtatataaggtataaaagatattattttgttttaagatttttttagttacgtggcgtatgggaagcggtgtcgggaattttttagggtagttttttgtttcgggggagatcgtgtttaaattttcgaggaaatgttgttttttggttttttttttgaaaaattttttaaggagattttgtgcggagcgtgtagggagaatggagatttttgtgagattgtttcgggatagttttatagaaattataaattatttggataaaagttgaaaatttgcggttatataatgttgattatttatttaaatattcgttgagtaagtatttatgacgtttgggaatttaggacgtggatcgataagatataatttttatgttcgttttagtgatagagagagagacggtattattaatttcgttcgttgggggtttttttggagggggcgtgtaggtttagggttgaatttgtttagtggatgtgttatttacgtttgcgtattttttggttttgtggtggtttttggaataaaggttgagagataaaagataaggatttgggggagggaggacgtttatgtatattttattggggatattagtaaggatgattgtttagtgattatttagtgatcgagttatttggtgtttggagtttggtatttatagagtagggcgggggtagtaggttttgtcgggggtataggtttgagaagggagtgttgttagttaggttcgacgggatagagagcgaagggttttttttttgaaggttatgtagaggtcggaggttaatgttagtaattttattaacgttagttttttgagatcgatttagagttggggttttaagagtagttttgggcgtttaggagttaagattttatagagggtgttttttatttttagtttagggaaagtgataaatttggagtgtttttgtttatggtttaattattgaatttaaatgaatgtattgataaatcgtatttagtgttatttatagggaaaagggagggaaaaaaaaaaaagaaagagagttaatcgcgtttaggtcggtcggttagggggaggatagatgggttattatttttgttattttttaggttttttgtattgattttttatttttagtaaaattaaggtttagttttttttcgtagtttcggagtcggttgggatgaagtaatttttgtaggtagattattaggtttattgtgatggttttagtagggaatttagtttaggttatagtagtttaggcgtttgtagaaggtttagatttttgggtgttaagttttttttttttgtattcgtttcggggttcggtggggtgggtagtgtgcgatttttagggttgatgaaagagaggaggaagaggttgagcggcggcgagtttgaatagttaattttgggaggggttgaggtggggaaggtttttattgttgttttataggtttcggagtaaggtttttatgattttattagtagttgggtaggtataggtttaggtgttgagtgtgttaggattttcgttgttttttgggtgggggcgagagggatttttatgggtttgtaattagattcgcgtttttttagttaattttttattaaataaatttatacgtatagcggattgggtatggtcgttattttcgggagtttttttgggaaagttttttaaggttttgttgagtttcgggaataggtttttatttgttcgggaatcgggttggtatttaataaataaattaaagttcggcgtcggaaggtagaattttgggattagagttttagttaagggttataagttttttaggaagttttttttttaaagagtggttgtgggacgttgggagtttttagggtggttagtttttaggtttttttaaagtttaggtggtatcgatgttttgtgttaaggtgagggttgtagagaggggtcggcggggaggagtttttatagtttattttggttattgattttatttttaagtattgaaataaagttttttttttatattttcggttagggagagagggcggaagttttaaatattcggggtgtatgggaaaggtttatatgtatagaagaattagataacggaagttgttggtggtggtgataggttttttaaaggggttttgagatttttgatatcggtagggaagttatatattgtattaggtttgggggtagggagaaggggtttttaaggacggggttgtttttttttgtggaagtgtttcgtattgtttgataagagtagtttggattagtcgtggtataataggaagttgggagaatacggtggtttaggaggttggttagggttggggagtggttaatttagagattttggttgtttaagtgggtttagggttttcggggtgaaagtttttgtggagtatagtggatttagtgttcggaggatagattttaggtttagataaggttttttttttttttttttgagatagagttttatttttgttgtttagattggagtgtagtagtataattttagtttattgtaatttttattttttaggtttaagtgatttttttgttttagtttttcgagtagttgttattataggtacgcgttattatgttcggattagttagtatttttagtagagatagggttttattatgttggttaggttggtttcgaatttttgattttaggtgatttgtttgttttggttttttgaagtgttgggattataggtatgagttattgcgttcggttaataaggttatttttgatatggaatgttggtttgattatagtgtttgatggtttttgtttgtaattatgttttcgttttttattaaagtagggtttttagggtagaagtcgtatttttttattttagagtgttttacgttattttttaggcgtatatagtgggttttttttatcgtagttgaattggttttattattattataatgatagtttataggggcgggggttagtgggaatataaagtggttaatgtaatagtgttttagttatttcgatatagaaatggttaggggatagaaggggtaagttgggagttagtagtaatttaggtttttagagacgagtattaaaaaaggcgagttatattataggttttttttgattatattttagtttaaaagagatttaaggagaaataagaattttatttttttaataaggattcgtatattagatgttaagtaaatattttttttttttttttgaaaaggagtttttggggttgtcgggggagttggttaaagagaatgatatttatggaaatatacgtggttttattaagttttaaggtaaggtggtaatgaatggaggaggaaaatttatagtattattagggaatggggtttttttttgttttttttttttttaacgggtttttttatgtgggatttaaattaaattttaattttattttgatttagtaggtgttgtttttatagtttcgaatagatttgttagaaaattattgtttaatttgttttcgggtggtatatttttttttaggaaaggaattataaatttattttagatgagtagagagttgttttttaaatttttgattaaaatatagtagattttatatgaaaaagtaaagagagaggggttagggatgaagtgtagtaggttggaggttgagttagtttttagagttattgggacggcgttttaggagtagatggtattgtttataaagtttttcgtttttttttgttttgaggtcggggattatttcgttggttgtatgatttagtttttggggtttttttagtatgaaaagattttttgaaagtaggttcgttagggagattttttagtttttgtttattgatatgtttttgtatggtcgatacgtagtatgttattgtagagaagtaaagtatacgtagattagtttcgttagtagtatttttttttttcgttttttttaggaacgttttgtatatatttaatatatttaggaatttagagttgcgttgtagtagtagttttttggattttagtgtcggcgtcgcggggagtttcggttacggtatttcgagtattgagattatttttagtttttagttagtcggttttcgggagtttagaggggtgataatttgagcggagtgattttagagaaagcggtggttaattcgaatttttttttggtttttttggaagttagggaaattttttgcgaaaaggaaatatgttttaagaagtttcgggtagtaggagaatttagttatttagtttagttggttaaatatttataaagagatagttgtgattatataaagttttatttttttattttgaggtcgaaaatttggttttcgcgtggagatcgagtttttcgttattttttttttggggatttcgttcggttttgtcggtttcgggtcggggtttagggatagcgtggttttcggtatcgttattatggttattagggttcgtttcgcggtcgcgttatttgagagttttcgagttagtggtgtaaggttgggaagaataaaggagtaggatttattttagtagcggaacgtcgggttgcgttggacgcgtcgagagtcgcggttcgtttatcgggttatatggtttagagtcgagtagaggattaaaggggttttgtggtcgcggaataaggagttttttagagcgcggggtagaggtagggagggatttcgattgtttgggaagggaggttcggtggggaattgttttaagggggtagggcgaggggagtaggaggagggggtaggtagagataggggcgtttagcggtaggttcggcgtagaagtaatttgaaggtacgggagggacgttaaggagttgttatacgttaaaggaaagtgatagggtttttgggaagagtgagggggagttgttaggaagaagagaggggaagaggtttttagggatttttggttatgtcgtttttgtttttgtttttgtgtttgttagaggcggtgttcgtgaggagttttttttttttagttaggttttgaaattgatttggatattttttttttttgtgttttgtttgatatttttgttttttaggtgtttttttatttatttgtttagatatcgttatagttgggtttttagggagtatggttagttattttagaaagttatttagatttgtagttagggttggaatatagttatttgggtttgttttttttattttaggtgtttgttggttgggattatggaagggagaaggagtaggagaggaggggtaggggatgggggcgtagtttattttgagtttttttttcgagagtttttggatttagatttgatttagtttttgtttttttagtttttttagtttttgggggatttggttagtgagttagtttttttttttttttttttttgtaggtttgggatgtgttgggatttagaggggtataagtaagggggtttttagaggagggagttgatattataggggttgggtttggacgttgggatttgttagatttattttagtgttacgatttttgaatttaagtgagttatttttagtaggggcgtggttatttttatattaggagagagcgtttgggagtgggttcgtttcgagggtttgttgggggttgggagggatttatttaaatggaaagaagtttttggtgatattttttgagggttaggggttgaattttggaagttacgtttttaggtagtttttacgggattttatgttgagtgttgattgggttttatatatttttattttttttatttcgtatttttatacgtggttgggggtgattgaagtttcggggtattcgttatattggttaaataggttagttacgtttagcggttttttagttagtagttattggtatttgattcgtcgttttttattttttatggttaattttttttttaaggttttttggttttacggttttttttatttttatagtgaacggtcgtggggagttgttgttattggttttcgggcgttaggttagagtcgggggagtgtttgggagaagattgtatgttcggagtttttgtttttatttgaatgggagggaggttggtggtagattagagatttgggttttgagttaaatattgaaatttaaggttttgggtttgttatttaatatttgtggaatttgattttttttatttataaaatgggtattattaatattagtcgttaaaattatagtaagatatatacgtttaggttaggaagtgcggttatttagaaaatatagttttttttttttttaagaagttaatttttttagtattgggagtgagaagagtttgttttttttattgtttgtagtttagtttagggtatttttattattggtttttaaagggtagttttagaaatcgttgataaaggatgttagaaggaatttttttttggttaggtgttagggttaatagaaagtttcgaggatgtagtttttattacgtttttgtttcgtgggttttttttttttcgtgggtagaattttttttttttggttttttttttcgaatttttttttttttgtttttggttttaatttgttttttagttttttggttttttaggttttttttagggtttaagattttgtttttttttaagtttagttttttttttttttttgtttttggatttttgagttgggaggttagtattttgggtgttttgttgaggtggtcgttttttttgtagtggttttttttgttgttattaaatgagggtttttagagtatagagaaggtattttcggtttggggttgtattttttatataaagtttttgttttttagtattttttaaagttttttatcgtttagtatatatttagtatttaggtagagtagttttagagttttttcggttggttttcggtttaattttttagtagaaacggtatatgggttatagacgtaattttatattttttagtatttataataaaaaatgtaagaataagttaggtatagtggtttacgtttgttatattagtattttgggaggttgaggtgggtagattatttgaggttaggagtttaaaattagtttggttaatatggtaaaattttgtttttattaaaaatataaaaattagttaggtatggtagtagttatttgtaattttagttatttgggaggttgaggtaggagaatcgtttaaatttgggaggtaaaggttgtagtgagtcgagatcgtgttattgtattttagtttgggtaatagtgtgagattttatatttaaaaaaaaaaagaaaagaaaagaaaaaggaaattattaaaaaatgtaagaataggtgatattaattttaatattatttatttaatagagtttaaaatattattaatttaatatgtaattaatgtaaaaatgatagatatttgatattttttttttttttttttgttaggattttgaaatttagagtgtattttatatatacggtatttttttatttggaattattatattttaggtgtttaaatggtttcgtgtagttagtggttattatgttggatagtgtagttcggagagttttaatttttttttttttttttggttgtcggggaatagagttttgttttgttatttaggttggagcgtaatggcgtgattttggtttattgtaattttcgttttttgagtttaagtaattttttcgttttagttttttaagtagttgggattataggcgtatattattatgttcggcggttattttttgtatttttagtagagatggggttttattatgttggttaggttggttttaaattatagattttaattgattcgttcgttttagttttttgaagtgttgagattatacgcgtgagttattacgtttattttcggatagttttaatttgattttaggataatattaggttattagagagttgttgatttggattatattatgatttgaattttttagattattttcggtattatgtttataagttatatttagaggataataggatatagtttggtgaaatatatagcggtattttttataagatattggtgaggttatagattttattattagtgttattcgtttggggatattttatttttagaaaatgtagagttttttttaagaaatgaatgtggttaggtgtgttggtttatatttgttattttagtattttgggaggttaaggcgagtatattgtttgaggttaggagtttaagattagtttgattaatatggtgaaatttagttattattaaaaatataaaaattcgttaggcgtggtagtgtgtgtttgtagttttagttatttaggaggttgaggtaggagaatcgtttgaattcgggaggaggaggttgcggtgagttgagattacgttattgtattttagtttgggcgatagagcgagatttcgttttaaaaaataaataaaaaaagaaatgaatgttttaggtatacgttaagtattttttagacgattttaaagatattaattattgtgattgacgacgatttttttttttttttgggtgtgtttgttttgtttttttagtttataggtgtttaggatttaaaggtagttcgttataggttatgggatttggttggtttaaaagggagagtgaggttattggaatttttttaggagtgagtttgaagtttggaatgttttttggtggagggttttgaagttaggaggcgatgtagacgtgggggttgagatattatttggggttatttgtaaagagggatatttaggtagtgattttaaggaaagagtaaggggaggagagggcggtatatttacgtttttttaatttttgttcgttcggaggtttacgtattttatacgtcggttttttcgtatggatatttttttaataagtaatttatcgtgtttatgtttatttattttaaagttatatagaattgtatttattaaaaatgaatttatggagatagaaagtattttggtggttgttaagggttggagagggcgaatggggagtgagttttttatggatacggggtttttttttggggtgatgaaaaagttttggcgttagatagtgttgatggttgtacgatattgtgaatgtatttagtgttattaatggtaaattttatgttttgtgtattttagtataataaaaaaatatatatttaaagtaatagaatttaacgtgtttttttttttttttgagttagtttgtttttttgttttatattttaaaattagaagggttttgagatatattataggtttttagggtaggttgaataattttttttttttaaattgtgttattttatgtggtaatagggattttgtagatgtaattgaagatgttgagatgaagagattatttaggtgggttttaaattataagcgttttttaagagggaggtaggttaggtgtgatggtttatggttgtaattttagtattttgggaggttgaggtaggtagattatttgaggttaggagtttaagattagtttggttaatatggtaaaattttgtttttattaaaaatataaaaattagttaggtgtagtagtatatgtttgtaattttagttattcgggaagttgaggtaggagaatcgtttgaatttaggaggcggaggttgtagtgagttaagattgtgttattgtattttagtttgggtgatttcgttttaaaaaaaaaaaagaggaaggtagagggagatttgattgtagagaaggaggaggttgtaggaggatggaggtagaggttggagggatgtagtcgtaagttaaggaattttagtagagttttttatttaaagttggaagaggtaggaatggattttgttaatattttgattttagttcggtgagattgatcggtttttgatttttagtattgtaaaggaaggagtttttgttgttttaagttattgagtttgtgataagtagttatagcggtaataggaagcgaatgtagtttttagtttattttttcgtttatagtaatataggcgtttttttgtgtagaattttgttaggtagttagtgagcgggataggattttttttcgtttttattcggggttttgtgttggattttttaaggttgttgtttttgagatagtgaattttttatatttatagagatttattttaaagttgagaaagtgttttttttaaggggcgttagaaagaaggttttaaggtgtttttgttatatgtttatttgtttgtgggtaatatttatagttttttttcgtgatttatttaatagaagggttataggggagggagtattattggttagtttattttatagtaaggttttattttggaagttataggggatagttgggatttttatttttaatttagttaattgggagaagagtttagaatagttttggaggttgatatttgttaggaagtgtggtgatatttacgtgttgttgaaatatatagtaatatagtagtagagaggaggggatgtggttttatagttttttttttatttatttagtacgtacgtatatatatatatacgtgcgtgtatatatgtattaatttttagtttttaggttttgtattttgtttttgttaagtttttcggttattattaagttaggttgtgagtatagagtttagtttttttgttaatttttttttaatttattttgggtaatattttaatgggatgtagtagatgttttttattaaatgttaagagtaatatttttttttattttttgtgagttggcggtcgcgtttttgtatgggggtgcggaggaaagggttggggagtaggaatgtggttttgagggttggtatgtatttgtagttgtgacgtttcgaggtagtttatatttttatttatagattaattttgagaaggggttgggagtatttatagtttttgttatttttgggttggtaggttggggaaattttgagtagttcgagtgaaggtcgtttttaggtaggtatggtgggatagaggggtttttgtatattttttgtgaggtagcgtagttgttgggttgttttagtatatttgggtgatatgttttttttttggtttttttttatttggtttgggagaacgtttaggatgttttaattttaaaaataagtaaattttttttttttgatttatttatttttttaaattgtgaattttttttttgtttgaatagtttaattttttaaagtaggtttatattacggtttttagttttttatcgtttatttattttttagttcgagttatttggtgttcgttcgttttattattaatttagtttttgaaaaaatttttatggttagtatttagttttattttatttgatttcgagggtagtgtttgatacgtattagttggttttttttttttttttttttttttcgtattttttagtgttggggtttagatagtttttaagggttttttcgttttttgatttagttttttggagtgattatattttcgttttagttttttagtttagttgtttttttatattttgttttaggttttttttttggaatattgtttgtttttagagatttaagtttttattttttatattttttttttcgatttttagtttttttattaaagttttattggttgttttttttcggtgttttaaattagtttttttttgtttagattttataaggttagtttttattttatgattgtttttttggattattgggattattttttattaatatttattttttatttcgtttttttttgtttatgtagggttttgttggaggatttttttcgttttattatttttttttttaaatagttttttaggtttttttgttaaagttgaaattttttttttgtattcgaggatttttgtaatttggttaatttatttttaagtttgaatttttatttttgtttaaggagtttacgttttttagttaggttttattgtttcgtaaattttatttaaaattttttttggtaaatgttattatttttaggaagtttttttgatattttttattatatgtgatttttatttttagagttagattttgatttggagattttgatttttatttatttttgttttttttgagttttttaggttgtaggttttagtttatgtttgtgggtttttgtagtaggagggtttatttttatttttttaagaagtgttcgttttatttttcgttaagttgtaattttttataagtaggtatttttaatatgtttttttatttttttttttttttttttttttttttgagacggagtttggttttgttgtttaggttggagtgtagtggcgcgattttagtttattgtaatttttattttttaggttttaagtgatttttttgttatagtttttttcgtagttgggattataagtatgcgtcgttacgttaagttaatttttttttgtatttttagtagagatagggttttattatgttggttaggttggttttaaatttttggtttgaagtgattcgtcgattttagttttttaaagtgttgggattataggcgtgagttattgtatttagtttaatatgtttttttatattttttttgaaaagttattattatattaatagtgtgttttataaattgataataatttaaaatgtgatttattattaaaagtgtgattttatttttaaataatattgttggttgtggtttgtagttagttttattattttcgtgtgatgattattttgtagattagtaatggttttaggtttatatttaatttaattattttgtttttttaattttatttttttttgagttaatattaagtgtgttttagagttgtaaatttatggttgatataaaattaggatttttaatatttaatataaagtaatcgggttttgtattggttttaatagtaattataaattacgtttgttttttgtattgggtatattgtatttagtttataatatgtgtttttgttttttttattttttttattaagatggtatataggtttaaatttgttttttgggagtaattgatttttttttggaagatgtgagtagtttttatattatatttaagaagatattgttataagattttatattttttattttagtttttaagggtttatttatttttttaaaaatttatttgttttgttataatatgtgtttttttttttttatttgtttttttaagatatagttttattttgttgtttagattggaatgtaatggtatgattttagtttattgtaattttcgtttcgtgggtttaagtaatttttttgttttagttttttaagtagttgggattataggtgtgtattattatattcggttaatttttgtatttttagtagagacggggttttattatgttggttaggttggttttgaattttcgattttaggtgatttatttgtttcggtttttcgaagtgtcgggattataggcgtgagttatcgtattcggtttataatatgtgtttttatttttttttttttttttattaagatagtatacgggttttaagtttttttttttttttttttttttttaagattagttggttgggtgtagtggtttatgtttgtaattttattattttgggaggtcgaggtaggtagattacgaggttaggagtttgagattagtttggttaatatagtgaaattttgtttttattaaaaatataaaaaattagttaggcgtggtggtgggtgtttgtaattttagttattcgggaggttgaggtaggggaatcgtttgaattcgggaggcggaggttagagtgagtcgagatcgtgttattgtattttagtttaggtaatagtgtaagattttgatttaaaaaaaataaaataagtgggaagaggggagatagtggaataaggagtttaatttgtaattgattgtgaataattaattgagataatttattattttcggattagttacgggttttattttttatttgtttttttgagttacgttttttagtgaaattttatacgtatgtgattaaatttgtttttttttttattaatttattttgagtgagtttaatttatagatttttaaatattgaatttaagagggtagaggaaatgtatttttttttcgttataaaaatattttatttttttattgtagtgtcgtttgttttatttatagtcggtaatttggatttcgttttttaaagtttatgaaagtaggatagattgtttgtaggatgttttcgttataaaaggagggttaggtttggtaggaggaaagaaacggaagtggtaaacgtttattttttgcgttagatagaggtattaggtgtttattgttttggggagtaaatatttttaaaaacggaaagaaaaatttttagttttattggggtgtaaaaagttatgatttttttcgtggttaaatggttgggtggtttgggagataagcggtagttattttgaagtttagtttatttgtttgtaaatggagggtaatgaaattatttgttgtatgggtgtttgataggttgttgtttaaattttttgtttttttttatggggttttggggaagattatatgagttagtaatataaaagtattttgaaaattatacgaagtgtttaagtatgggggcgttggttgattttaggtttgtttttataagttggtagaaaattttttagagagggttttgttttttttttcggggtaggggtcgtagtgttagatttgatggtattggtggttgtttaggttatttggtatgagattgttgttagttttagatttattttaagtttgggagggaagtaggtcggggtgggggttttgaaattttttatatttttggtagagatattagggtaggtaaaagtgttatttatggtaaattaagaagtttgtttgaattgggtttaaattagtttagtttagaatggaggttagttttattttttttttttagaattaggagtttagtatattagaggttgagaaaacgttggaatagtttttttatttgtttgtttagagatagggattttaagttatttttttttttagtttattttataaattttttgtgttagattttttttgtttaggagttataggttttatttgggagttatttagggttttaaggtttttattatttagttgtttattttattaggttaggtttgtaggtatggagattagtaggatgtggtttaaatttggttgtacgttgattagttgagtgattttgggtttattttttaatttttgggaggtaatgtttttttatttgtaaaaaggggaaagggtttagcgaggagagtgataagtaaaggagatggtatttgtgtagacggtattgtgcgggcgtttagcggatgattacgcgttatttttttgttttttttttttgtttttgtgggagcgtgggtagtagggagttaagaggaagggagtagttgttcgtttgggacgtaggtcgttttgaattggaagagaaaaaggaataagtagtagttgtttattgataagttttatgtatttgtgttttaaaattttaaaggtgtatttgaaagattttttgggtaaatttttttttatagatatacgaaagttaggtgtagtggtttacgtttgtaattttaatattttgggaggcgaaggtaggcggattatttgaagtcgggagttcgagattagtttggttaatttggtgaaattttatttttattaaaaatataaaaattcgtcgggcgtggtggtgggcgtttataattttagttatttaggaggttgaggtaggagattcgtttgaattcgagaggtggaggttgtagtgagttaagattgtgttattgtattttagtttaggtgacggagcgagattttattttaaataaaaataaatttaaaaaaaaggtatatgaaaaaggtaaaatgttatgagtgttttgtcgtaatgtgttagttataaatgggaattggaggattttttaagttatttttttttttattttttttttttttgtatatgtattaatagttttttgggtgttggtagtattaggggatttggggtgttttataggttttgtttgtttagattttagagttaaggaggagatataaaagttaaaatagggtggtaagtggaataaatggggattagatggggtaatttggtagtattcggtaaggttttttttaatgagtttttaaagaggtttagtttttaggggaaggaggcgttttaggtagcgggggtttgtagaggcgaaggtttagggcggggtttttagggaagtcgtttaggatgttcgaaaggaggggagtaatttacgagtttggtgatagggtcggttataaagtgttatgaagtattaattaggttgtttattagtttttaggatagaaagattatagtagttaaggtgtggggatttgtttatttgatttttatttagtttagaaaatgattgttttagggttataggtaatagtttaagttttgtaagttgttggttatagggtgtagttgcggtaaggtggggacgtttattagttaagttttttaggatttttgggttgtcggatatgtttgtaggacgttacgggggtaggttagattaggggtatttttatttttttttttaggttttagtttttaggttagagtgttttttggtttttggggtttttagggttgtagatagatagggagaggtttgtgttatggtgggttatttggtttttgtaggaagtggttagaggttttagtatttggatatagtagttatttttttaatttttgttaatgttgttgttgttcggggtttattttttttaatttttttttttaattagggaggaaagtattttggagtaggaattgggttatttagtttgatattttagtatgattttgtatgattttgggttagttatttaatttttttgggtttttatttttttatttgtaaattaggtagataattttttaaagttttttttagttatagaattttaagtgttaaaataaaaaaaatttataaaaaggaaatatgtgtttagtttatattttcgtttttatttgttaaaaggggaaatggatttgttacggggttttttttttttaaatagatatgggagattttttttatgattgtagaattggagtagtttagaggagtttagaattttttagagtttgagatttataggggaatttattttaattttttcgggatagaagtattgttgtttaatggtatttaatttttattattgttgtagtaaatgattatatatttgtgatgttaaataatatagattagttttatattttattttattaggttatagggaaggtgtttatagggttgcgtattttttcgaggttgtaggggagattgcgtttttttgtattttttgtttatttgtattttttggtttgtggttttttttttttttttaagttttttttattgtattttttagatggtttattgcgtttttaaaaatttttgtgatgatagcgggttcgtgtggattatttaggattatttttttattttaagattagttgattagtgattttagttggttttgttatgttatttaacgtagttttaggtgttggggattaggatgtgtttaattttgggagttattattttgttaattttaagatataggttttggagggagatgaagggtaggattataggtttaggaggttgtttgcgtgggttcgaattttggttttattattaaggaattgggggagtatattatttgtaaaatgggggtcggcggggaattagttttttggttgttagcgtagagtgaggtagtgtgtgtagtgtttggagtagtttcgtgagtatttgtttttttttcgttaaatttataagaattgatttcggtttaacggtttttttaaatttttagtttttttcggttataaggttaggagtatttttttgtagggttatttaagtttttagtttttttgaaagtttcggtttatacgatgttggaagtagatgtgtcgtgggttgtttatttatgtatggttatcggagaggttcggatgatgtcgtttttaatgggtgtatagtgtagggtagggttaggtattaataattagttatagttattagcgtaagtaaggggtttttattgttatttttggtttggggttagggagaagtttcgggaggtatttgatttttttatagggagtggggttataggagaatgtattcgaaaggggttggggggtagtagaaagttttttttagaaattttatttttggttcgtgatagatgatttttttaggttattattggggtttatttgggtttttgtagtatggagtttggttattttagaaggatgattgggtaggttagggttattggcgatggtgacggtaggtttttttgaggtttttttattagaagtattaggaggttagagtagtcgataagtttttatttggtttttgaggggtagaaggttttgagtagttttttgatttttcgaggtttttttattttattgagagattttcgagagtattgagagttattttttggttttttcgtgagagagttggttatataaaggtagttatatatttagtaagatgaatttataatttttgagtttaggtttatttcggtttttttatagggagtttttgggggcgtggggtgggggtgtagaagggaggggtcggtgttttatttttgggaattaggttatgagttttggatttaggttaaattatagaggttttatttttttttaggttttttgttttttaattatttttgtatagggtatttttttttttttcgtagggttttattggggtggggtgaggaggagttatagaattatagtagttgttatacgggggtgttaaggtagggatgttgatgttaatcgaatgggtacgggaaggtagagtaggaggtcggcgttttgggtttggttaggttgtgtgattttagggaatttattttatttttttcggtttttagttttttttattgtaaatcgagggagtgaggttaggtgatttgtataatcgcgtgaatttgtgttttgtattttttatttattattttaaataatgtttttaaattttagttttttaatgtttcggtatttttttgtttgagaaatatttacggttgttttttatgttgtgttttaaatataggtattttggtttttttttgggtgtttttattagggttagaatgggtagtttattttgtaggaatttttaaggatttttagttatttttaggatgggggttggttgttcggaagcggtttttgtttattttcgtcgtagtttttattacgaggttagtgtagtaaaataggaggtgtaggtggtcggggttaggggttaggttattttttttagcggggtaggagaggggcgagaaaagttggatattgattattttaggttgagggtttgcgtggaggagggggtttatggtaaaggaagtgggaggatgggaaggagtttttgttggatatttttatttcgttggttttagtttcgttttcgttttatttgcggggagaaagtgaggttttttgttttgttaaattttagtaatgaattttatatttattttattttttgtttattggaaattttttttttattttttggattcgttttgaatagttgggttgtagaagtcggtggaatgaaatatgtagggtggtttagaggggattgtgtcgaatagcgttgtgttttcgtttatttttttttttgaagataaggtttttttgtttttgttttttttttgggaaagttggagagggggttgaggaaatgggatttattattaattttttcgtgtacgttggtttttagtaggtatttttatattttttaattaggttcgtagggtggaaaggtagtcgtcgagtttaatttaatttttatttagtcgtggaagttagtgtggatggtaaagtatttatgtataaatatatatacgaggttgaggttaagagaatacgcgtttagtttttttttggttttttagtaacgtttttatgttttagttttgttttaagttttaaacggtgtaaggtttttttaggtggaggaatggaagtttttaagaagttcgtgttttagggattatatagaggtagggtttaggagtaaaggtttttagatttcgtagtgcggcgttggtaagtttgcgttgttgtatttatattgttttgggatgaaggcgatatgttgattttttttaggtggttgtaggatagttaggaggaggtgagatgttagttaaaggtagttatagataatagtattacggattattagaaacgttattttcgtgttaaagcgttcgttttttttagttgttttattttgtgttaatattttttgggagtgatatgtgtgagattgggttgtgttgatgagtgattattggtatttttagattatattaaggaggggttattttgttgttaattaggtgtagggtaggcggtattggggtacgacgattcgttcggtatggttgttttatttttttttttgtttgagtataggttggtaggtttagaggagaggaggaaatagagttattatggggggcgtgtttaggggtgagttattttaagaagttatagaattagggtatgggagatattgtttagttttgttattaatttgtcgtgcgaagttggttaagttattgtatttttttgggttttaggttttgtaattagagggttggtcgaagaggtaaatgatagtggttagggatgggggtattgaagttagatttttcgtattcggattttttttttgttatgtttagagggaggtttgggtaggttatttaatatttttgggttgtgggttttttatcggtgaaatgggaataataatagaattaattttatagtgttgttgggaggattaaaggggatatttattttaggtaaagagtttttaagatagttcggggtttttaggaagtttttgttattattatcggatattattatttttgttacggttgttagggtttcgtttagtatcggtagtttgatgtcggtagaggaagggtgaggtttttgtttttttgtagcgttttttttttttttttttttttagttatggtaataatagttgaagtttatttttagttttagcgattggttatttttttgaattaaggattgaaggttttaggtttgttatttaaggtttaggtgtaagaggggtgagttatcggtttttgtttttattatatttaggtttttatacgtttttttaaataggtttttgttttacgtgtaagagaagatgttaatttttacgtttggggcgggggtgtttataaatgttttggacgtgagttttgacgggggttatggtgtaggttttgttagggtatttttaattataggggattatttgtagtttatagagggttttttgtaggttaatgggattttgttattttggttgttattttgtttagttatttggtaaggaaaataggttgtagatttagaggtagtacgggtttatatgttagcgagataatataataagggaaggatgtgtaggacgagggagttatggagattttatcgtagttttagttatttattagtagattttgtgcggacgtcgggtaggttattttattaatttttaggatgtttttgtaggttttgcgggtggatagggtgaacggaggtataaggagggtaagtttgataggggttggggttgggtttggagttagaattttagttagttttgttatcgtattttagggtatttttcgtagatagtaggttaaagtaaggttgtttagattaaaggggaaggggttttgttttttttattaagggttttttggagattttaatatagatttttagtttatagatattaaatttagggtttttgagaagtgagaaatgtgaaaaacgtatagaatagttgtagtttagcgtttttaatacgttagatttatataggtatatatagcgtttttgtagaggttagaaagttttgtgttgggaagtttttcgatcgggggaggttttatagtaagtttttttttttgtttatttattaacgggcggaaggttttaattaggattatatgggaagggttagcgggaggggtagagagggaaaatgaataggtaatattaagtgtttggggcggggggcgtaggggatatttaggaggggagggtaggggtgtattttttatttaatttatagggaacgggggttcgggaggtgtaggagaaggtttcggtatttttatttttttttttttgtagatttatttatagtttgtttacgggtagttagatttagttataggttagacgttcgttttagttttatttttttggtttattgaaagtaagttaggatagtgagggggacgatgttgttattttcggtatggttatgttgggtttcggggtgggtgggaacgtggttggggcgttattttttttggtcgttataggtataaaagttttttcgtgttttagtgttatatgtgggttttttttttgttgttttaataggacggatatttaagtagattttgttggtcggggggggttttcgtatttagttttattttgatttagcgaattttttttttgttttttggggtaggagttattaggtcgggttttaggtaatggttagtgaaggggttgtatggaggggttttttaggtttataggaagggaggttttttttttttgtaacgtggttgtagtattttgtgatcgagagggatattacggttggagatggtgggatggaggattttttatagtattttcgatgtttagaatattttattttgtataaaaaagttttaaatttttttgagggttgaagttatttagagttggggtttttgttttttaggttaaaagtattttgtcggagtagttgagagtatagcgggaggggaggggtaggagggaatagtttcgttacggcgataggggattttttgattttaagagggtttgtagatattattatttatttttagttttgaattgttttttgttaaggggttagaaatttttgggagggggattatagggggtttcgtttatgagaatagtgattgtggttaggttatagtttataagttagtaattttgtttagtcgtcgcggtggtttttttttgatggtttttagaaaaagcgttttattttttgttattagtgttttgaaatttaagaatattttttaaatagtaattgtagtaaaagttaatgttgcgtgagtgtcgtaggtattatttttagggttttatatatttttcgtttagtttttataaaaattttattttattttttttttcgttttttttttttaatagtttagaaaacgagtacggaagggttaagttggtttgaggaggggttggtggaatagtttgagggtttagtttttaagaattttatattgtaaagggaatttttgggttagggagtagggtatagtttttatttttttattttcgtttttagtattaggtttgatatagacggggtttcggttatgaataaatgaataagtgaatgagagtttgttgagggaagaaggtgatagggataagggagaaataaagtagttaatgtcgtcgtgatgatgacgatgttaacggtagtattgatatgtgggtttttgttatgttaggatcgttttaagtattttgttttatgaatatttttgttttttattatgtttcgagtggatatttttattagtttattttatagaggggaatatagttgagcgtattggttaaggttatgttgttaggaaaggttagagtttaggtagtatgtggttttttagtcgggttttggtttatacggttttataggtagttttatgaaatacgtagagagagtatgtgaggggtttttttgttgttttttatttttagttggggtttattttttgttgaaatttttttaatttgtttttaagtttcgttagttacgaaatatttttttgaatatttagtattatttttttatggttatttggttttatttttttatagggtaagttttgggcgaaaagtagaaaggatgaaaatttttgagagaggtgataacgtggtaatttttttttttttttttttttttttgagatagtattttattttcgttgtttaggttggaatgtagtggtacgattttggtttattgtaatttttatttttcgggtttaagttatttttttgttttagttttttgaggagttgggagtataggtatgtgttattatattaggttaatttttgtgtttttttgtagagatggagtttcgttatgttgtttaggttggttttaaattcgtgggtttaagtaatttgtttgttttagttttttgggattatagacgtgaattatcgtgtttggttgaggtggtttttatataaagtagagaaaattatttttagtttaaaataaattaataagtattgagtgtttatgtagaaaaagattagaaggaaacgtgaatatgttaatagtgtttgtttggaggacgtaattattattgattattttttttatattttttaatttaattattttgttataagtaggtgtgatttttaaaattataaaagataaacgttggttttttgtttgtgttttgttttttgagatagggttttattttgttatttaggagttggagtatagtggtgtggttatagtttattgtagttttaaatttttaatttaagtaatttttttatttgagttttttgaggagttgggattataggtaagcgttattatttttagtatttttgttgtttagattggtttcgaacgtttggttttaagcgatttttttatcgtagttttttaaagttgggattataggcgtgagttattacgtttagtaaagattgttttttaattaggaagatagatgttttttagtattttttgtttttttttttttttttttttttgatacggagtattgttttgttgtttaggttggagtgtagtagtatagtttcggtttattgtaatttttgtttttcgggtttaagagatttttttgttttagtttttagagtagttgggattataagcgtgtattattatatttggttaatttttgtatttttagtagagatggggtttcgttatgttgattagtttggttttgaatttttgattttaagggatttattcgttttggttttttaaagtgttgggattatatgcgtgagttattattttcggtttgttttttagtatttttaatttttgttttttggtattatttggttaagtagatgaaaagttttagtgagttgttagtcggtattaggttggggttttttttaggtagttttaagtggttaggatttggttttttttttagagttgggtttagaaattaagatcgggaatgcgtgatggttgttttgcgggtttttgttatgaggttatttttttggttttagtgatcggtcgttggttgtagggagtatgtgggtttagttagggtttgtgttaatatggttttgttttatttacggtttagtgggtttttttatttttcgttgtatgataattttaggaaaaatgttaggagggagggagtcgttgggggtgtgataggagagattttttagggatagatttgtaaaaattgttttaaagttttttttaaggatttttaaggtttttattgttttttattgataggttacggttcgggtagagaaagttggggatggagttggcggggggagggtggttagtattcgtaaggtaaggagatgagttgggagaataggggttgggagggtagttttaggttagtttttgtttttagaattattgttttttttttttggttataaagtgaggttggttagatataggtttattttataggttgggaggttgggcgtgaaagtattgtgtttgtatggggtattttatggtgaatattattagagttaatttttagggtttgttgttttatagggaagttagtgtaaggcgtttatggaatttagaagtatttaaaggatttgatagttatgagttgggaggatttagttttgtagtaggagaaagagaggtagagagataggtttcgtaatatttgttttattcgttgtgttgttttgagtatagtttatttttttgtggtttcgagttttagttttgaggtttttaagattttttgggttttcgtagtttaggatgtttatttgaaaattaggtttagttagtagggtttttttcgttagtttattattggttagtttttgtttagtattttttagtttattatttttatttgtgtaaattttatattagtattttaagtttttttttttttaggaaggagattgtttttagatgtgttttttgttttttttcgattaaagtttagaaaataggaattagttttgcgttttttttttttatcgaattgttggtttttttggatgttttttttgattttttgttaatatttttataatataattagtttttagtttttttttaaatgtaatcggcgagtacgttgtagtttaggcggacggtgatgtttttattttgtaatttgcgagagttagtatattttttagttaggtgggttgtaggagttagtcgtggcgagggtaggaggtttgcgtgttgacggtatcggtattattaaaattacggttagattaaggttacggttaacgagtttttttatttgtaattttttttttattaaggtggttttagttttagtttcggttttagttttggttttggttttaggagttgtagatatatttttaagtttttattttaggagtttggttttatatatatcggaggatacggagttggggtataaatagttaagaataggtatatttgtaattaggagtagggggcggagggttgttgagatgtttttatttttatcggttgttttttttgacggtttattatttattatatattgattgtataattagggttgtgatatgtttgttttttatattatattattaaatttttaaatttgtttttaatttatatacgatgaggtaaatttagagttaataatttgtttattagtttttgaatttatgggtggttttaatttttttttttttagtttttttgggtttatatgagtattgaggtataagggaattttattagttgggaagtgtgttttttttttgttgattttatagtttttttagtttgtgtttgaagttgttaatatttttttatttagtattgttttttgtagtttgagttgtcgttgtgtgatttagggttagtgttttaatttttttggattatatttgtaagatgaggatgtcgtcgtatagtttattttaaatggttattaagttgtttgtatagttaatatttgtcgagtttgtgatacgattagttttgttttaatttcgaatgtggtatttttatttagtttgggggtggaattgttagtttttttttttttggataaggaagttgaaaggttttagaaggtattaaggttagttgatttgttagtaggtatagtgtttatttgttatttatagtttttttttgatcgtttcgtttgtttttttagttgagattttgtgtgtatttgaatattttgttaatggttgaatttgtattagggttattgtgttagttgggtttgttaggttatcgttttcgagttttgtttaaggtagggttagtgtttatattttgtttttttgttagtgttttatttaaggttttggaaaggttttggagttagagattcggttaaattttggtaatgttttatatttgttgtgtgattatgggttagcgatttagtttttttgtgtttttcgggttgttgtgagggttataggagatgtatagagggttttgagtttggtggttggtatgttgtaaaggttagttacgtggtgtaaggatggtattgatgataataaatgaatcgaacgaaaattaggttaattgggtttggggaggggcgttggttaaatagattcgagtggattaggattttgtatatgatgagtaagcgggaatagttttaaatagtaagtcgggtaggtttaggatgatttagttttgggtgttgtttagggttttttttcggtttttttgtcggtttggtttttttttgttttagtttgattgtttttatgggttttaataagtttttgattaggattgaggtagaatagatagggtttaagattttgtaggtaggtatagagtgtggatggtaaaaggagatgttttaggttttttgtcgttttttttttttcgaaggttgataatgttaatttatagaagaagttgtttttttcggtttcggattttattttaatatagtgtatgaggtagttgtgtttaaggggtgtgattatttttgtagatggaatttatttattgtgtttagtttattgttagagttcggaggacgggggaagtgaggtggggtattttttatagtgaagggaaaatttagtttagttatttttttttgtgttgtttttggaatttattttgttatggttttattttaatttagttttttaaagttttagagagttttgtttttttttttgtattttatttcgtttatttgtgttgggttagttttttagaagtttcgttttttgttatttttagggtattaaggttggttggtgggtttagggatttttattttttgatttagttttagtggtttattttatatttatcggtatttataggtgtgttttttattttcggtttttgtataggcggttttatattttgggagtttagttttttttaaggatttacgttagagtatagggatttttgtttttgatttttttttagttttaattacgagtagtttatgttatagtaattttttagttgtttgtagttgtttgttaagttatgataatggtttttgttttttaatttaatgtttgtatatagataaatcgttatattttaagtagattagatattattttttttaggaagttttttttgattgttttagttggatagaggttttttttttttgtgtttttttaatgtttaataggtatttattgagtattcgtgatatgtaaggtatttataatataagttagtgttttttgtttttttagagggtatatgaataaataaacggtaagattttttaatatttatttatgttttatagaaagttatttataggtatgggagggttgttttaattgcgggtgatagggaggtttttttaagatggtagcgttttagtaagatttgaatgaggcggttaggaggtttagggagggattttttaggagggaataagtgaatattttttcgtgaggatgagtttttatgttttaggagtagttaggttaggggatcggtgtagtgaataggggttgaggggagtggttaggtgacgtagggttttataggtcgttttacgatgagttagcgttttaagtatagtagatatttagggaaggtttaggttggggagtgatttgaatagattttttatttaggagtttatcggggtttttgggtttacgttgttgcgttattgtatgttttcgggggttcgggggggtattttttatattattattataggtagtatttttgggggaggtgtgttgtgtaggggattcgttggttattttgtcgggtaaattataggggattgtgtaggataggcggttagtttaggagggataattatttaagtaggggttagagggtattcggattcgggaggagtgtttaattttttaggtttaggtaattagaggtggggggcggggtgttgttttttgatatgggaggtttgggggtttggttgtattttttggtgtggaggtgttgggaggtgtggaggtttttttttgaggttgggattttttggttattttgatttattgtttcgattttattttttagtttgagggtatggtttgaatttatagtcgtatatatttttttttgtatagggttttgcggggtcggtatagtagttttttttttatagattaggatgtttagttttaggagggttgggattgtttaagatcgtataattagggttagatatagttgggttaattttgtgatttttggttttacgtatagattttaagtatataggtaaaattttgttggttgggagggttggggggtagatgagcggggggtagtttttttttagttttttaatatgttaggtttttgggtgggagggggtataaagattttattttttttaagagatagagaaagaggtagtggagggtttttttttggttgaggttttaggttttgagtggtgaatgtaattttatttggaggttggaagttaggcggttttgggggtgtgcgaggttcgttagtttagttgtagttttttttatgtaagggaattttttttaggtagcgtttttatgattagagagggggttaggaagaggtgagggttgtatttagagtgatattcgggtgggttttattttggggatacggttatatttttttttcggatttttgaagtttttaggtgcgggttaagggtttttagttgtaggtaggagagggttttatagttatagatttggggagtttagtttgtaaagtttagaggttttcggaggtcgttggttcggttttttgtgtagttgggtttttttgggaggttttttttcggtatttttagtttttagttcgtacgattttttatagttgggtttatttttttaggttcgggttatatggtgtaggttagtggggttttgggggagggtagggcgttaggaatagtttcgggggtggggggattggagtagagtttattttggtcgtttgtttattttgtatgaaggacgttagatttttatatgtggttattcgatttcgtttaattatgcgtaagttttggttatttttattttattgatgggaattaaattggttaaggagaagtttagaatttgagtagagtaggggtttaagttttttaggagttttaggtattttttagttttttttttcgagtattgagtttatatatttagtgttcggatgtttatttatttgggggttcggcgatcgttagttagtatggtttataaagggtttttgtgtaataggttttatttgatttttttaaaaatttttcgaggtaggataatgttatttaatttattttatagataaagtaattgagttataaaatggtttgttaaaagatatagaggtagaaagattaatagtaaagagtttttttgtgattttgattagtaaggtttttagaaaaaagtaagggatttcgaggtttttataggaatagagttttggaggagaataagagtttagttttatgttatttttaaggggtattttgaaggttaaggtattgggtttaagtaggttggattgtgttttttgtattttttttattttttgaagtttttttttttttatttaggtgggtcgtggaggtgtttataatatataatggaatagttggtaggttattgggttttttattgagttaaggggttcgattagaggtttaaatagtggtatagaaattatgagtttcgttgtaaattagtttaggttttggagttaagtagttttgtgtttatagttagggttagtcgtttttagttgtgtggtttgaggttagttttttaatttttttgtgtttcggtgttttttttgtagtagtaataggaatcgttttttacggcgatagtgtagatatattttatgaagcgtataaagtttcgagtttagcgtttggagtacgttaggacgtagtaagtggttatttatgatttatgaaatattaataaggtgaggggtggaatgatagtttttttgcgttgtttttaaaatggaaataaatttgtttagcgtttaaagtagtagaaagtgagttaaggataggtttttagcgatatgttttggtagagtgttttttgttggttttaggtagggtttagggcgggcggttattttttagatgagtttatcgttggtatttgtttttagagtatatgtttggattttttagatttttttttttttttttttgatttttttttattttgtaatttttattttttgttatttttttatttattttttttttttatttttgtttaaaaataaataatggaggttaaatgtgttagttggttttttggaaaggtttttttgtagtaggaacgcgacgggggtagtggaggattgtttagcgtaagttacgtgattttcgcgcggagtcggggaaggggaggcgttgagatcgagggtgttaggatcgaggtattgagatggggttattggataatggttagggttagttttcgtttttattttaataggggtttttatatttaggggttatatttttaaagttttttggataagagagataaattttattatagggttagaaacgttgtttttaggtcgttatttgggtgggggtgagagatgtttcgtcggtttttaaatatttattttgtggataaaattattaaggggaatttaatgtttttatagtagtttggttaagatataggtattaggtcgggcgtagtggtttacgtttgtagttttagtattttgggaggttgaggcgggcggatcgtttgaggttaggagttcgagattagtttggttaatatggtgaaattttatttttattaaaaatataaaaattagttaggtgtggtggtgtgagtttgtagttttagttatttaggaggttgagataggagaattgtttgaattttggaggtggaggttgttatgagtggatattatattattgtattttagtttggatgatagagcgagtaagatagttttaagaaaaaaaaagatgtaggtattgttttagggtttataagtataatttgatttttgatgttggtatttaattttgatgtagattttagtaggaaaagggagacgaattagaaggttgtggggacgaggggtttatagtagtgtttattagatttgttttggtaggtataagtgttttttggaggttgttagataagtagagggtttattttagagattttggttttggagggttgggttagggtttaggaagttgtatttcggtagggaatttagagttattttgagttttattttggaagtaagagttagggggtagaatagaatcggaattaaaagtttttgtgggtttagttttatggggatgggttcggttttatggggatggatttttgtattattcgaggtgattattagttcggtttttcgggattagttttgagtgttttttggggaaagcgggatttgtagaggatggttttttaggattcgtttgattatttatttttagttcgtttttattttagtttttttgatttttattttttatttagaattttggagatttggttttggaggtttagagattagaaatgaggggagataaggggagaagtttttttttttattcgttggttacgttaatgggttgattttttaggaagttatattagttattgttattgttttggtcgtttcgtttggtttcgaggttgggtgagtaagtatttcgttttgtttgtttttttatttgagttttttgttgatgttacgagaggtttgattacgcgtttaggaggtataggatagagtttagagttgtttaagaatatataaggttgaggttcgggttttgtatttgggaagggttaggaagggttaaaggaaaattttagttgagtataatggtttatgtttggaattttagtattttggtaggttaaggtaggaggattatttaagtttaggagttggagtttagtttgggaaatatagtaagattttatttttataaaaaaaaattaaaattaaaaaattaattaggtatggtggtatatatttgtagttttagttatttggtaggttgagatgggaggattgttgagtttaggaggtcgagattatagtgagcgggatattgggttattgaattttagtttgggcgatagagagagatcgttttaaaaaaaatttttatattttatggagtttagtagaattttcggttagggtgtttcgattgtgaaatgagcgtggtagttgttaattttcgagggtgaagatttatttattagtaatttgtattttggtacggtgagaggaagtgtttggggaaagacgtcggtcgaggtagagagtttagtttaatttatcgtggaggagttattttagttttaaagagaaagattaataaattttaggtgaatggtttaaaagttatttttgtatacgtagagggtgtattttgggatatgtggatatttttttttaggataggaagtaaaattagtaggtagagacgtgagtttttttgtttttgtcggagttaatttggagtttttatttcggtttttagggaagtatagatttttatttttatcgtagttaaaagattttttgttgatttttttagtagtatttagtttagttttgtggggagaggcggtagggggaggagatagagaaagatgagtttttggtagttgtgattggggggagagaaatgcggttttaatttgtttttgtttattttatagacgggcggtgttttattttaaaatttagggtagttgagggattgaaggaagagggggatattttttaattggggtttttttttattttattttatggcgttttatataggaaagagttggaaggtttcgggtttttggtatttagttaaagttttaggtaggggtttagatattgggttgtgttattattttaggtagttcgggagttagcgacggtagagttttatttttatttcgattattgtatagtatttcgtttttaggatagtttagtagttaggttgttttagggtttaaatttagatatttaattgtgggggttttaggtaagtggttgaagttttttgcgttttgattttttaatttggaaaatgggatgatgaaagtaattgttgggtagggtaaggggtaagtgaaagttagcgtttgagagtgatgtggttaggatcgttgttgtgattatatattgagttttttttttttatttgagataagggttttattgattgttgttagaaagatttagatttagaaggattaggaaagtcgttttatttataattttagagggaaggggaggttttcgtgttagttggttgttgtaggggagagggtgggagatagatgggggatagaggagtaggggtagtaggaggaacggtcggtagggaagttcgtttgagatttaaaggattgtttattaggaggatagtttaggttttttttattgagaaagatttttttggatagttgggttgaggatttttaggttttttgggtggagtagaattagttattattgaagttatataggtttgtaagtataagtgggggattgtttaggtatttttgttttataggggttaggtattaaggttagggtggttagaggatatgacgtagtttagtaggggtttcgtagaattattagttaagaagatatatgtagaagtacgtaagtgtttcgaggaggtaaattttttgttggattgaatatggggagttgagtttttaattattgagtcgggttgttcggttcgtttttttttttttgaatagaaggtttttagatagagtagttaggtaatagtatggttaagtaggggtttgtattttagttttgttttgtagtttgattaggttgtcgtttttttaggagatacgggattggttagggtttttttaggttgttataggaataaggtagggttgtgattttttttatggtttaggtatttgggggagggattatgagttttagtttaggggatagataggaaacggatagttcgttttttttttaattacggagttggttttttttttatcgtattttttttagttatgttttttattagaagattatcgtatttaatgggtggttttgtagcgatatttagtttaatgaagttatttggtgggggttttgggggatgtagttttttgaaatatatacgggtagtgggtgagtcggaggttgcgtggggttttgttttttggggatggttaggaggtgttttaattatttgtaattcgagtttatagtgatcgggatttgttgtttttttattttagtttttttttattagtattcgttaagcgttagttagtaggtgtcggtacggtttaaggtaggtttgtagttagattagtatcgggggagggatcgggagagagatttttagagtggaagttatagttttttttttttttaggttgggtaatagattattatttttagttagttttggggaagggggaggggttagttgggtcgtaggtatagcgttggggttttttgaggtggttgttgttgattacggttttttttttttttgggttgggtaatagattattattttcggtttattttagggaagcgggaggggttagttggggtataggtatagcgtcggggtttttgcggcggttgttgttgattacgggtttgttattttttttttagttgggttgttatttcggttttgaaagcgttttttttagtttttaattcgtgtttaggaggtagtcgatattttaagcgttgttatagtaggaggttgggtttgtaagtgtgattcgtttggggaggggtagagggaaagattattttcgtttaaatagcggtttttttttttttttcgggggtttttatagggtttttagtttttttttggttaagaggtaaggagaggtaggaaagttttaggaatatcggtagagaagagatagggtaggttgttagaggaagtaggttgtagggtgtttaaggttttaggttgggttttgggaggttagggtatgggtaattaggaggtttaggtagggaaatttgtttcgtagggattttgggagataggggagaggggatatgatagtcgttttttgttgttttttggttgtggtttttaggggttttagtttagattagaagtattttatgtatcgggtttcggtttagtttggaagtacggtttatagatttatatgattatttgggtagtgatttttaaaaggtttttcgttattagttggggagttttcgaggggagggtggttttgtagagtatttggagatattaatgggtcgtgaggaaaggaggaggcgtggatatttttacggttttaagagaaaattaaggtagagttggaggttgggcgtggcggtttatatttgtaattttagtattttgggaagtcgaggtgggtagattatttgaggttaggagtttaagattagtttggttaatatggtgaaaatcggtttttgttaaaaatataaaaattagtttgttatggtgatacgcgtttgtagttttagttatttaggaggttgaggtaggagaattgtttgaatttaggaggtggagattgtagtgagttaagatggtattattgtattttagtttgggtaatagagtaaaattttattttaagaaaaaaaaagagtagagttggaggttaggcggtttttagagtttgataaggaggtcgtggggttgggttgttttttcggttatttgaggggtagggattggtttagtttgagttttagatttataagaggttgaatcggagcgggatttcgagatgaggtagggttattttgtttatatttgtgtttaggttttaatagttattttttttaggaatttagtttgatggttttttaggttgagaggttgttaaggggttgtaaggtgtcgtaacgtgtgagtcggtgggttttgatgtgtgatagttcggggtattttttttatcgttagggaataggaatgaggagttttttatttttagtgtttggtaggtaggaggtcgttattggattgtgtgtttaggtgttattagatttcgagggtttacggatacggtatatgatttttaatgattaacgtttgtgtagtaggtgttgaggtgttttaatttcgagtaaggttgggtttttggaatttttttttcggtaggaggatttgtagttgaggaatttttaagaaattttttggtagtaaataaagtatggggttggacggtggatttatgagtgtttttatatgaatgcggatatagatagaaaagacggtaaatatttgtgaataaaaggaatggtttttgcgtattgaatttttatttatcggtttttgtttggtataaagtttttaggaattttttaatagttttagttagaaacgtgtttttgtttggttatgtggaaaattttatatatattaagatatatgatgtttttggttttttttacgaatgttttatgttttttgggtttatgatttggaatttgtagatttttgttgtttttgttttagagttataaggattttggatgtaggaaatattttttatgtgtaagggttttttttttttttgttagggtttatcggtttttttttgtttataggtgttatttaaatttttgtatttgtggttttttttttttaattatttcgtgtaattcgttaatagtttttttatttttagagtttggttgttggagatatataaggtatatagaattcgtgaaatgatattgagtatttattaggtatttattgtgtgtttcgtttggtaataataagtaaaattataatgttttgggtatatgagtatatttttttatgtttatttttttagtaatttaatgagatggttttataaatggggaaattgaggatagggaggttagattggtttaaagttataggttaggaggggtagggttaaaatttaaatttagatagtttggtattaaattttagttttttatacgaaaggtattttgtaatttttcgagaaggttgggattattatttttattgtatagatgaggaaattaagatgttaaatggttagatagttttggagttaggaggtgggtttagtggtttatgggagtatatggaatggagtttatgggaggttcgaggttgggatttcgtattttattttggtttaagggatgaggtgattgggagtgttagagatattttgggattggttatttaggtgttttgtatttagttttagcgttgagtgggcgagggtggataatttgttatttagtagggttgttgttcgtatttcggtggttttttaaagtttggttaagtaaagtaagattgttttcggattagagtgatttttaagttatataagtatttagttatgtttcggaggatgtaggattgggaaggttttttttttatcgtatttttatttagtttttttatggggtagttggttttaggtatagattagacgtttttttttttgtttgttgtcggtatgtttttggttttattgttgttttagggaggggtttaagagtttttcggtttcgttatttattatatttcgtttagagggtcgggggtttagtattaacgttaagtatttagtagtaaaattacgggttggaaagagttatagtgttgttttgatttggttttattttatatcgggtgtcgtttttattagtttttttttgtttttggttttattttttaggtattataagttttgtaggtttaaagttaaatttattagtttttgattttttttagttgggattagggtgaggttttcgtttaggtgtaaaagttaaggtagtgttaaaaaatttaggaattaaataatattttgaagtaatattttaaataaattaaattttacgttgaataaattttgatagggttgtgtacgtgtagggttgggtttgttttaatttaaaattttaatatttgtttattatagagattattatgtattatttcgatattgaaaaatattgtattaaatattatttgtgttgatttttgagttttttggtgtttttttatattttgtttttgataagtgtttgatatattttgttttagtcggttttgttttttaggtgtttttttggggttgttttgtttacgtttttcgtagttattaggagttattgagttattgtatttgttttattttgttttttatgttttcgtatcgtttatttcgttatgtttttttcgtgtgttttggtcgtacgttagttttagataggagttcggtgggttgggagtttatattaatgttgttttttttcggtttcggtgtcgggtatagggtagtattggagatttttttttttttttttttttttttttttttgagatatagttttattttgttatttaggttggagtgtagtggcgtaattttggtttattgtaatttttattttttaggtttaagttttgttttttggaattaagtagatttttttgttttagtttatcgagtagttgggattataggtatacgttattatatttagttaatttttatatttttagtagagacggggttttgttatgttggttaggttggtttcgaatttttgattttaggtgatttgtttgttttaattttttaaagtgttgggattataggtgtgaggtattacgtttggtcgagattttttgaataaataaatattatcggtatggagattcgtttagggaatttgtttagattttgttattgtatttttgtttgttgcgtttagaggtaatttagggtcgttttagtcgtttttatttggttattttttggtttttatttaggtcggtttgttttattttgtgggttaagaaaacgatttagtgggtggtgattagtattttttttttaatttgaaaagaatatatttattagcggtggtagtaatttaatgttttttagttgatgaaggtaatatgtttgtttataatggaatggtttatgttatggtggaatattatttagggacgtattggtatttgttataatgtggatggattttggaaatatgatattaagtggagaagttagatataaaggttaaacgtgtaattttttgtataagaaatgtttagaatcggttaggcgtagtagtttacgtttgtaattttagaattttgggaggttaaggtaggaggattatttgagtttaggagtttaagattagtttgggtaatatggtgaaattttatttttataaaaaatataaaaattagtcgggtatggtggtataggtttgtagttttagttattcgggaggttatggtgggaggatggtttgagtttgggaggtggaggttgtagtgagtagagattgagttattgtattttagtttgggtgatagagtgagattttattttaaaaaaaaaaaaaaaaaaaaaaagaatttatatagataggaaggaaatatggaggaggagggtaggattgatagttaaaggttacggggtttttttttaagaaaaaaattttttaaattttttaaatttttaattttttaaaattggttgtggtgacgatggttgtattattttttgaatagattgaaaattatggaattatgtattttaaatgggtggattgggttacgcggtgatttatgtttgtaattttagtattttgggaggttgaggcgggtggattatttgaggttaggagttcgagattagttttaatatggagaaatttcgtttttattaaaaatataaaattagtcgggcgtagtggtatatgtttgtaattttagttattcgggaggttgaggtaggagaattggttgaatttaggaggcggaggttgtagttagtcgagatggcgttattgtattttagtttaggcgataagagtgaaatttcgttttaaaaaaataaataaataaataaattggtggattgtatagtagtttatttggattttaataaagttgtttaaaaaaaaatgaaaaaaagttttttttttttttaaaataaataaataaaaagaaaaaaagagagaggggaaaaaaaaaaaaaaaaagaaaatattgagtgtagtatacgtatggtaaaggtaagaattttattacggaaatttggttttattaatatattttatttttatttttattttatatataggtgtgttttggttcgtggtgttaatcgtatgtttttttggaggttgtagtttagattggttttgaaagttgttttttgggtaattttaaattttttataatttttgaagtttttggtttgttgggattatttagttttttagatttagtttcgttattatttatttaagattgtagttttggggaggggggtttttttttaagggtgtaggggttttgtggttttatttttttttagaatatatattattttgtattgtatatatgtgttttaatatggagtattttaggacgttggttatagttagttatgtttgtatatcgattgatcgatcgtgttttgttgattaattatgttaattatcgcgttgtatattgtttttattaagcgagttaaagtaattttttcggaataagttgacggattttaaataagttaaaagatatttttttaggaaaaaaatagtaatgaattttaagaagaaagaaaaatttttaaatttatagatttatggaaaaagtttaagtttttaaagtgttagatttttttaaaagtattaggtttagatggttttacgagtgaatttttgaaaagttttaatagagagattattatgttgttgtttaaaatgttttagaaggtagagggtaaaagaaatgtatttaaattgtttttgttaagttagtataatgtagatattaaaattgataaaaatagtatatatatatatatatatatatatatatatatacgttttattcgttttagattaagttcgttgttgtgtatttaagtaatattatttatttttatttcgttgttgaaattaaaatatattttaatggatttatgattttaatatgtaaaaatgaaattatagaagtattagaagaaaacgtgggtgaaatttttttttataattttagaacgtaggagatttttaaataggatgtgaattttaaaagttaaaagggaaagtagagatttgataatattaggattaaaatgttttgtgtagaagaatattttagaaataaaattaaaagtaggtagttggggataagatattcgtatttgttgtgataaagatgtataaataatttttttttttttttagataggattttattttgttatttaggttggagtgtagtggtatgattatagtttatagtagttttaaatttttagatttaaatgatttttttatattagtttttcgagtagtcgggattataggcgtattattttatttagttaatttttgtagagatgcggttttgttatgttgtttaggttggtttcgaatttttaagtttaagtaattcgtttattttagttttttaaagtgttgggattataggtgttagttattacgtttggtttataaagaattttttttaaaaaattttaataagaaaaggatatattttttaaatgaaaagagaatatagggttttggtttataatatacgaagagataatttttttcgtttgatcgagatgtataaaataaaatattaattggagagtatttggtttttagttaggggtaaggggtataggatttttttgttggattattattgtatagggtttagtagatagttgagtaggtcgacgaggggaggggttttaaaaaattttagtaattattttagaggttaatttaggaataaggattaattttttttttttttttttttttttgatagggagtttcgttttgttatttaggttggagtgtaatggtacgattttggtttattgtaatttttgtttgttgggtttaagtaagttttttgttttagttttttgagtaattgggattataggtataagttattatgtttagttaatttttgtatttttagtagagatggggttttattatgttggttaggttggttttgaatttttgattttaagtgattagttcgttttggttttttaaagtgttgggattataggtgtgagttattgtgtttagtagattaaaatttaaatgtatatatttttgatatagaaatttattaagagtttattttttagttatgtgtgtatatgtataagtgcgagaatatttgttgtagttttttaattatagtgggaagttggataagtttggtagggttatgggatagttgatgatataattattaaaaggaacgtgttattttgggaggtcgaggtgggcggattttaaggttaggagtttaagagtagtttggttaatatggtgaaatttcgtttttattaaaaatataaaaattagttaggtgtggtggtaagtatttgtgattttagttatttgggaggttgaggtaggagaatcgtttgaaagcggaaggcgaaaggtggaggttatagtgagttatagtgagttgagatcgtattattgtattttagtttgggttacgttttgttaaaaaaaaaaaaaaagaaaaagaaaaaggaacgtgttatatttataagtggtaatagtgttgttaaatggaaaaaataaaagttggtagtagaagtttgattttttttgtgtttttgaaaagtttatatttatatattgattttttttatataagttttgaatgattttgtaggaataaaatttaggagaatgttatatttagttgttaatatggttattttttgggagagagttggggaatgggagagaaaaatttttttttaaattttatgtgatttttattttttatttaagaatgattgggtatcgttttttttttttttttttagatgggagttttgttttgttgtttaggttggattgtattggtataattttagtttattgtaattttcgttttttgggtttaagtgatttttttgttttagttttttaagtagttgggattataggtgttcgttattacgtttcgtcgtgtattgttttttaggatgaagaaagggaaaggttatagggagaatgggagttagaatatagagtagggtttttaaatattagtttgcgggtgagagagatacggggcgatattatcggtttggaatttagggatggtatgaggtgttgtttaggggttttagataaggtttgtttgttgattaagtaagggttgtgttggtttttgtttatgtgtttgtttaatacgaattttttaggcgttttattttgttttacgaattattattgtttattttaattacgttgtataggaagaattgtgtttatttttataatgagaaaacggattagagaggaaagttattaggtagggtaggggcggtagtttaggtagtgtgagggtaaagtcggtgtttttttgttatttttttatatacgagtgggtaaggtattataggagtttatattttaatttttgcgggttattttggaaggcggtagatggaattagtgatttttagggttatttttagttttaggttttagataggggtcgtggagtggaatcgagtttgatttaggtgtgttgatggtagttatgtaattgtggataaattatttttttttttatttgtattggatgagatcgggaatttttattttgggttttttaagagttttggggttttatagagtatatttagtagtagtagtgggatggggggatagggttaggggagttttatgttttttttaattttaattagagtatttttattttaatttttttttgggtttagtgtttagagagaacgggaaggaagtttagttttggttatgggttattttagtttgttagttatagtttatattttaggagttttttttggattgaaggagatagagttatttataatatttatagaaaatttcggagaggaagtggagtttaattgaggaagcgtttttttgtagtttttagaaatgaggttataggtgagatagtgtgttagggtggattatatggtatttttttaggttgtttgttggaatttagggtttggttaggggttgtttatattttgggtttcgaggcggggagtttgagtgcgtttttttagggttgaatgtgttttttgtttatatcgtatagagtatggttgtttggtcgcggcgcgttttttcggataggttcgttattgtgtagatttttaatttcggtagttgtttcgggtttgggaggcggcgggtatagatatagttttttttttttttggtagttgttttgattttttgggataagtgttgagaggcggttttatttagtgttatgtgtttgggggtcggggttttattttggggttaggttgggtggttagggttatagagttgtagggggcggagtagagaaatcgtttttagcgtttgttttttggttttattttttttcgtagttgcgttttatttaaggtattttatagttgttcggtattcgttgtattttcggattagtttttttttttttttattattgtacggtgtttggtaggtcggcgaggggaggggttttttttttgggttttggagttaggttttgttttttggttttatttcgttttattacgaaggagatatatcgggtttggttaattttttcgtattgatttttgtttttttagtatatgcgggattttttattttagatttaggtttgagaggttttagggatagttcggagaaggagggtatttgtttttagaaggggaaagagaaagagatttaattttaaagtaaaaggggatttgggtgttttttgtaagtagtttaggaaaatgggaggaggtgggagtagcgggatttttcgagtaaggtatttcggtaggaacgttagtgttttttggatatttttagaagtagaagtatatagttttatagaaaaattttgtaggtttaggattcgaggtatgatacgatttaaatttattgttttattagatattagtgagtttttcgacgtttattaaggttttttgttttatatttggtattggacgaatttgtatattttgttttagggagtttatagtttagggataggtttagagtttatgtggggtgttttgtaaatacggggttagaagttgggttgtttatggggttttttttttttaaattatagtggttattttttttttaattttatagtttttgatttttattaggaatttttggggtttagtaggtgttttttttttgtaggttgatgttcgttttttttattttttatttaggtttagttttgattttattttttttaaagttatttttttattgttttgtgttgggtggttttagggagttttgtgttttgattaattttatatttaacgttgtattggtagttttgttgtttgtgttgagatttttttttgttttgtttttggaatatacggttcggtgcggattaagtatgcgaagagttacgtttattattattagttcgggggggtttgattttttgtttttttaacgttttatttatatgataaagatttttagattttttgggttataggaaaattattgagatatgttgttatgtttatttcgttttaattttatatttatgtttataagtggttttagaattattgtggattttttttttggtttttggggtgggtggatatatgagagtttagtttttagttatttttgtagatgtttttttgatagattaagaaattgaggttgggaggggtggaatgatagtttagaattagttgatttatggggtagagttgggatatgtttagaattgagttgggtattgggtttggttttttttttgtttttagtgagtattttaagaaggtagagaattagatttatgaacgagcgttgagtattcgttttataaggtagttttggagaaatttggttggtgtggttgaggagtcggaggggggtaattttggtggggggggttttgagttagtagttagtttttgtaggtttagtattgggtgttgtagtttagttttattttattttatttagaggtatttatgttggggggtaggaaaagagtagggatttaggagaggaggtaaggtcgtttttatttagagtttgagaggattagggatgattttaaaggatgagcgtttttttgtgggaggatagtaaggagggtgttaagtttaggggtagggttagagtttcggaaatcgagaatttattttattagtataaagtttagattttattaggttttggggcggaggagtaggtagggatgtttttgttttttgtagcgttttttttttttttttttttttttaattatttaggtgtttatatttttttttgaaatgttgattttttttagaatttttatattgaagttaatatttatttattgagttttttagtataatttttagaggagagattaggtgttttgggggtaaagttgattaggaaagtttttgtttggtttttagggacgatttatgggggttattatatttgtttataagaattataaaaaagttattttaatttattattagtggtttatttttttagtataattttatggtatatttattatgtttaagttatttatttggtattttatgggattttttttttttttttttttttttttgagatagggttttattttgttttttaggttggagtgtagtggtataattttagtttatcgtagttttaattttttatgtttaggtggtttttttattttaatttttttagtagttgggattataagcgtatgttattatgtttggttaattttttgtattttttgtaaagatagggtttttttatgttgtttaggttagttttaaatttttgggtttaagtaatttgtttgtttcggtttttaaagtgttggatttataggtatgagttattgtatttggttttttatgggattttttataaaaattaagataggttgggtacggtggtatgattttagtattttgggaggttagggaagttgaggtgggtgggttacgaggttaggagttcgagattagtttggtttatatggtgaaatttcgtttttattaaaaatataaaagttagttaggcgtggtagtttacgtttatagttttagttattcgggaggttgaggtagaagaatcgtttgaatttgggaggtagaggttgtagtaagttgagattatgttattgtattttagtttgggtgatagagagagattttattttaaaaaataaaaaataaaaaaaaaatataaaaaaaaataaagataatagttttatttttagaatttagtgggggtatgaaaggaattttgaagattatatagtaaaattttaagtatggatatcgttggtttataggtgaattttaggtttttttttatttttgtattttttgtattttaaagaaagggtattcgattattttttatgatttgaaaaattatttttatatttaaaaaaaaaagtttagtagaggaaagaaagtttatatataaattatttatattttaagttaaatacgaggtatttggattaggttttgagggatgtataggagtttattaaggtagtgatgtaaagagaagtagaggttagggtttaggaggttagggtaaaggggttgtgaggaaaggtgtgagagattaagggaagattaaagtaggagaagttgggaaggagagaggtgtgagttgagtaggagagtgaattaatcgtggaggggtttatggtgagtgagtagagaaggtttagtacgggaagagattttagtagtgttgtgttttggggaagttagtttgggagtaatttagttggggttttaggagattttgttttgtatttatagttttggggtggagataaattatagtatagatgttttttcgtaggtagaagttaaggggttgggcgtttgtttagagggtacggaattttttttatgatttttttttttatggtgttagttggatttttggtgttcgggggatagaggggtcgtagagattggttagagttgtgtatgtcggggtttagggaatttttagtttagttttatatggaggggtagaaggggatgggtttgaaggaaagatgggtaggaagttgagttggagagaattggattcgtgtttagaacggtcgtgatatagagagggaggacggagaagtaagtaggtggtgtttcggaggaagaattagtggggtttaggtttgggtttttcgagaagttatttttatcggattttaagagtatttttttattgggaaggttttgttttcgtttgtttttgtattttttttatttggatttgtttaggtttttaggattgttagtttagtttacggatttttttacgtgagttggatttttatttgtataggtttttgttcgtgggtggtcgggtttgggatgttgatggtttttttttatgtttcggttttaacgtgtatattttattttatggagaaagttatcgtttttttagagcgttaggtttttggtagttttgaacgttgttgtttttacgtggtttgttttttttttttttttttggtttgatgaaattgtatttttattgttggggaagttttttggatattttttgtgttttagttattttgtttacggttcggtgagttttagaaagtagagttcgtaggttgtgtttttgggtttggttttcggtatagtttttggtataatttaggggttaaattgtgtttgtttttggaggagaatgtttttgtatatttttatggatatttttttatttgttttttagagttaggattacgtttttgtgtatttagtattagttattatcgagatttagatggttcggtgataatcgtttttttagttatattttgtttgatttagttgagtgtgaatatattaatttaggatgggggtgtattcggtacgttaaataaaggttttgtattaatagaaggtaggggaggaaatagttttttgttattttgtaaattgtttatgtttttggtttgatattatgttattagtaattattgttattgagtttgggtggttggggtagggtggttttttagagttaagtttagagagatgggagagggaatacgggattcgtatattgagggtcggaaaggattttttaaggtttattagtttttggttatttagtgtgtttcgatgttttttttgtaggaaatgtagagttttaggttttagattcgttaagataaatgtgtattttatatgtttatgaaagtatgaggagtattggtttttttttaaatttatattttttttaggttttatatttttttagtttttaagtttattgattattggagaatttttatttaaaaagaaaaattaaaaaggggttgggtggtttatgtttataattttaatattttgggaggtcgaggtaggaggtttatttgaatttaggagtttgagattagtttgggtaatttagtgagaatttgtttttataaaaaaaatttaaaaattagttaggtatggtggcgcgtaatttgtggttttaggtatttgggaggttgaggttggggaattatttgagtttagggggtagaggttgtagtaagtagtgattatattattgtacgttagtttggaggatagagtaagattttgttttaaaaaagttaaagaaaagttaaagaagatggaaagagggatttagagagatgtggaagtaatttaagggtttatcgatggaggaatagttatataatataagtgtatcgtataatagaatattatttagtttttgaaaggaaggaaattttgttttatgttatagtacgacggatgaatttttaggacgttatgttgagtgaaatgagttagatataaaatgggtagttattgtatttttttatatatataaggtttttagagtggttaaataaatttataataaagatagaaaatagaatggtggttgttagtagttgggggaggggtatggggagtttggtttaacggggacggagtttagtttgggaggatgaaaagggtatcggagatggatagcggtggtagttgcgtaatatcgtgaatgtattgaatgtcgttgaaacgtatattgtaaagtggttaaaattgtatattgtatgttgtgtattttattacggttagaaataagaagtagtagttaaattaaaaatttagattgtgttgtttgtttaatttaaagaaggtttattgagtattattgagttttgattttgtgtttagaattagatttggtttttgaggggtttttaatttagttggtattttattatagttttatggagttacgatttttgttggggttagggggtacgtttttgagaagggatttaattatgttttatagtttggtatttttaaataggttttgtgttttataggattggtattaattttttgtttgtaagttttatgttagtacggttgtgggtttgagtttttttaggacgttgttggagttttatggttttttttttttcgttagaagggtatttttaaataaaatcgtgtgtagttattatatagttttttggtttaggtatttttttttagtgttttgagaattttgttttgtaggttaaggtgttttttatgtttttttttttttgttataattattttttttgggggaggaggattagattatgggttttaatgtaagttttaggaggtatacgtttttttttttttttttaagttttcggtttttgttgggtatatttaggtagtttgtaattttttaagtaggagttattagaatgtgatagtttttttaggggttttaattttattttgttttatatttttgtatgagtttgttttggtttttgcgtggttttttattttttaagttttttaggttttttagggatatatagtagatagaggttttagtaaggtttacggtgatttataaaggaggttttttgaaatttagaaaatttttttaaatttttatttaagtttcgtttggggtattttggtatgtttttattagatagagagagttattttttttgagtttgtagatttttatttttatgtatttcggtttttttgggtttttagggtagtattttttattttatatttagtttttttttttaagattttgtggtaaagttagtaattaggttttttattattatagtatttaagatttagcgttttgcgatttatttttttggtttcggggtgtagttttagttatagggggttggggtttgggttttagtttgttttgtagttgagatataggggtaggttttgaattttttaaggtttgggttgggttgggggcggtgggcgttttagtaggtttgggtatttggatttttatttttttgggggttgcgtcggtggtaggggtagtgggtatttcggggattttggaggtagggggttttatttttcggtgggttgatttttggggtttgacgatggtgattttcgtttttcgaggggtcggttttggcgttttgtggtttaatatttcggtttttttgagttcgaatcgggacgggtcgatggtttcggcgttttttatttgtttggacgagatgttaatggatagtttagtgcgtcgggatatcggttcggtcgttttggggttcgagagttttatttttcgtagggacgttttgggggagcgttggtttagggagtttatatggcgggtcgagggttttgagttttttacgtttaggttttggaatttttgggtggagttggttatagtggttcggagtaggggagtttggatttttcggggtggggtggagttgggtgtttcgattttttcgattttaaaagatttttttaaggttgaaaaataaagagaggggatgtaattggtgaatggatggttagggaatatttcggtatgttttttgttaaggagtagtagaggaaggtaggcgatgcggcggtgagggtcgggggttttttttcgttttttatgttttagtaagcggaagggatagttttattttaggagaattattatgagttttggggtagagatgtaggttggagtgggaagatgttgttcgtcgtgttttgttatggttacggcgtaaattatatagtttttttttttagttacgtttatataggaacgttttagttttagagaagatttttatttttttttttttttttttgagatggagttttgttttgttgttttggttggagtgtagcggtatttttcgggtttaagcgatttttttattttagtttttttagtagttgggattataggtacgggttattatgtttggttaatttttgtatttttagtagagatggggttttattatgttggttagtttggtttcggatttttgattttaagcgatttattcgtttcggttttttaaagtgttgggattataggcgtgcgttatcgtgttcggttttgattttttttttgtcgcggttgtttttatttttttttatttttagttaaggtatatattgggatattattagtaaatatatttttattattagttatagcgggggatatgtttttaataataagtgatcgtaattgtaattaattagaatcgtagtaggaataaaattttattaatgatattaagggcggatattggagtttttagtgtcggcgaggcgtcgggtttatcgagtttattatatttgtagtcgtttaattttgggatgtaaagaatattagtatttttagtatagatggggaaagtggggtacggggtagatatagagttagattgtatattaggttgatattagagtttaaggttttaattatttggttgttcggtttttttagtttagtttataggaattaatttttttagttattagttttttttgtatttttttatttattattataagttcgtgtagtgatgttaattattagttttcgttttgtagttattttgtttttttattagggtttgttttttcggaggtagtggggatggtatttgggaagttgttatttttatagtttttataatcgtattttaaatgagagttagtcgtttttggttattagggttagagtagggagggatttatatggtaggtatatttattagttttttttttaggttagatttatagcgtatttttgtggagatttatagtgtttttttagtcgttttttgttttattaggttatagagttcgggttttatgggattttattattgttttttttgtttataggaaaagggatgatagttggtttttagtttttaataatagcgttttaggattaattttagtgttttttttttattcgtttttttttttttaaatgtatttaggtattggggaggggaagaggaagtttaattttttaattttggtcgttttagttgttagttttttgggtaaggtatttttgtgggcgttttttttaagttataggtattttttttttttggtggatatagacgaaattttgggttattaagtttaatttttattagaagttgggtaaggagtcgtgtggattttagagaatttttagttgttataggttttgttttagtttcgttattgttttagaggatatgggttcggcgtggttagagttgtttattttttaagagagtagaaatttggatttttatatgatattttttgatttttaaatgttggtataaagtaaaataagttttttttaaaatattgagtagtttggttgatgtggtgaaattttatttttattaaaaataaaaaattagttgggtatggtgatattcgtttatagttttagttatttaggaggttgaggtaggagaatcgtttgaattcgggaggtagaggttgtagagttgagatcgtgttattgtatttagtttgattgatagagcgagattttgtttttataaattaaaattaaaaataaaataaaatatcgtagggttaaataaaattaaatttataggttgtattcgtttatgggtttagttatgatttttagttgattacgtggtcgtagggtagtaggatattgagttttagagttaggggtgtgttaggtgtgggttttcgatatggtgtttttttgtttttttgtattttgtatgtaaattgttggttgtgttttgattttgtagaagttttagggttttaaggaaaggttgaatgtttatttttattagttagaaagtttagggtttaatgtttagaattgaatgtaatgagatgggtttattaagtttattatatttatattcgtttaaatttgggttgtaaagaatattattatcgttttcgtatagatggggaaagtgaagtacggggtagatatagagttagattgtatatcgggttgatgttagaaagtgtagagtttaatgtttgggttttcgtgcggtttttagggtttttcgcggttttttgatttgttttttgttttttgagtattgtttaaattgtttttatatggtgtgtttttgttttatgggtgttgtagagtaggggtcggtttttaggtgtttttagtattttttcgtgcggttaagttggagaatagaaattagataggagaaggttttgttttaggtttaatttaagaaaataaatgattttttttgggagattcggtgaattttttttttgggagtttttttggagttatttttattatggttaatttatgatcgaagatattgtattaaagtagaggttgttttggtgtgagtttacgattgagtttacggtgcggatgtaatgatttattttagttaggtttacgtgtataagcggattattttagaatcggagttggttttttttttagggtattttttttttttttagttgtttgcgtggttggcgttttattattttggttatttgcgtaaaatgtatatgtgtgtcggtttttaattattttttttttttttttaatgtttggtgtttttttatggatgggtttttttttttttattagttggtttttgtgtttattgtttggttttatgatttttttgggtgtttcggtttagtattatttttatgtttattagtttttagtaagttttgagatagtaggggttgttttattcgtaggggttattttattattaggacggcgttgtttaaaggcgagtttgttttagataatagttaggagattttatagtttttagaattgtaagagaatataattgtgtgttagaagaatagtgagaataggaggcgttttatttcggaggtgtttattttttttaggagatgttttattttgggggtgtttattttttttaaggaaattatgtttcggttggaatgttaagaaggtgatatttaaatgaagaggtgtttattttggtttacgttatttttttaaacgagtatgttatcgtttttttttttttttgggaattttttttaaagttaagtttattttagtttttttttcggggagttggttttttatatagtttatattattttttttttatgttattttggttacgttatgattgttgagattggttacgaggggtgtgtttcggtttttcgggaatagagttgaatgttttttattttatgatattatgtttttattaggttttaggcgtttttagaaaatttattaagttaggcgtggtggtttacgtttgtaattttaatattttgggaagttaaggtggatagatcgtttgagtttaggagtttaagataaatttgggtaatatggtaaagtttcgattttattaaataatataaaaattggttaggggtggtggtatatgtttgtaattttagttattcgagaggttgaggtgagaggattatttgaggttaggagattaaggttgtagtgagttatgattatattattatattttagtttggatgatagagtgagattttgttttaaaaaaaaaaaataattaaaatttattaaatgttaggcgtggtggtttatgtttgtaattttagtattttgggaggttaaggtaggtttaaggtaggcggattatttgaggttaggagttcgaaattagtttggttaatatggtaaaattttgtttttattaaaaatataaaaaattagttaggtatgggggtgggcgtttgtaattttagttatttggaaggttgaggtagaagaattatttaaattcgggaggtagaggttgtagtgagtttagatcgtgttatagtattttagtttgggcgataaagtaagattttattttaaaaaaaaggttggattataggattataggataggtataagttttgagggagtttttaaggaggagggacgtattagatttttatttttattttagtttgtgaagatttattttcgtttgaggttttgtagagggttgattagtgatttttaaaaagatatgtttaatatttaattttaagaatttacgaatgtgattttatttggaaaaagggtttttgtagatgtgattagggatttcgggatgagattattttggatttgggatgggttttaaatttagtgttcggtgtttttataggagaaaggtagaaggggatttgggatataaagagatacggtggggagggttacgtgatgagagtagagattgtagatgttgttagagttaaggagcgtttgggttaacgtaagttggaggaggtaaggaagggtttttttttcgagttgtcggagggagtgtggttttgttaatattttgatgttaaatttgtggtttttagaattatgagcgaattaatttttgttgggttatttggtttttagtaatttgttttagtagttttaggatatttataacgagatttttgggaagatgaaatttttggttgtatagtggtttagggtgaggttagttggtgtggttatttattttttagtttagttttaattttattataattatattcgataaatggtttattgtgggttaacggatacgtggttattttagagttgttatattaggagtttagaggagcgagagttgtttttttttttttttttggagtcgtataaaaattttagatggttggagaagttatcggaggaattatattattttagatttttgttttattgttgggatatgtggtaatgaaataagattatttttgttagggatgttttatgggtaattgtttttttacggaggatattgtgagttgtatttagtcgggaaatattaggagatgtttgttattaggttggtagaatagggttttttagtatttttttttttattagagttttaagattgcgttttgggttttgtagttatatacggtcgtttttttttttttaatgtgtaggttttttgggaagttttttgttattatttttatagtggaatcggtataatttgtttaggggtagtaggtttttgttattttatacgtttttattttttttgtggagggagacgtagttaaggggtatttatatttatttatagaagcgagagtgttcgtgagtttgttattttgtagattttagaatttcgtacgtgattgtatagatttataggtttaattgggtagatttaaaggatttacgtagtagggaggagtatcggatagtttttttttttgtttgtaaggagttaatgtaattgaaggatatagaagaggtttttagttgagtattataattgtggatcgtgtatagtgttagaaagatgcggagttaggttatgttgggaggatttttatgttgttattggaaggtaaagtagtgttatttttttatttatagagtaggaggtttttatttttgttagttattttttttatttgtgaatttaagttttttaaagttagattttaatttcgtaagtttttaaaagtttttttgggttttttttttaatttttatcgattttaatttgttttaaaagtttgaagatcgtttatgtgttttggtttatttttgggaatttattttaaggaaataattagaagtatagaaagatttacgtacgaggatatttgtattagtattaaattgataaaatttggaaatagttcgggttttcgtagattttttaaatttatatgttaaaggtttgtattattattaaaattatatttttgaagatgagaaatgtcgagaatattaagtaaaaatagtaggatataagatgtatataaagattttaattttattttatatatatatgtgtagtttgtacgtatatatatatttatattcgggtagaaaataacgatttttggatggaatgaatggcggtgggtgttgtttattatatttttttgttttttgagatgtttatattatatggggattatttagtatgtttagggaataaaattatcgatattgtttttttttttttttttttttgagatagtttcgttttgtcgtttagattggagtgtagtggcgtaatttcggtttatcgtaagttttattttttaggtttacgttatttttttgttttagtttttcgagtagttgggattataggtgttcggttattacgtttggttaatttttttgtatttttagtagagatacgattttatcgtgttagttaggatggttttaatttgttgattttatgattcgtttgtttcggttttttaaagtgttgcgattataggcgtgagttattgtattcggttaatattgtttttaaaaaatatattttggtattggttgggtatggtggtttatatttataattttagtattttgggaatttgaggttagaggatcgtttgagttaggagttcgagattagtttgggtaaatggtaagattttatgttggaaaaataaaattaaaaaaaaaaaaatatatatatatatagattttgatgttaataagttggagggtgtgggtaattgtatgttggtttatttttatttttatttttggaaaaatattttatagtttaggatgggtatagggttttttttatttttaagtatttacggttttagttgttatataaaaagaggttatagtgggttattttttagatgtaaatttttttttttaggtttatggcggggtcgaaataggagtagtttggatttgggtttatttagagaggaatgtgtcgtataagggattattgttaaggtttttgttttgattataggttgtttggtaaatcgtttttagtttttgaaattagattaagtattttttggtgtatatattaggttttagtttggggagggaatattaagcgagttatagagttttgttttagtttgggataaatgttatgtaaagaaatggtagagtttaaggttagaataattttatgcgtagtttagttttcgtaggagggagtaacgtggtttttgtttagggtagggtggaattttaggtttaggttttaggaacgttagttttggttaaattgggttttttttgagtagtagtaaagtaggttttgtttttgaagaaatattggttatttaggagttagggttagggtttagggaagtcggatagatggtgttaaggagtagggaagtatttttttgtatgttattttgagtttgtaggaaaaagttacgggaaaattttatttggtagataattttttataatttttaggatttatagagtgagtttagtagtatgtacgttatgggtatttttttgtttttatttttttgtgatattggattttggtataggtttttgatttgtgtagggtggggtgggtagttaggtagggttttggcgttggtagagtggggtttagttgtaaaggtttttttattttttatttatttaggatttgggggacgaggtttaaaggtttggtgtgtttttaaggagtttaaggattgttttagggttggagataggacgtatgggtttgtatagggatcgtgttttttattttagggttgagagtaggagaattaaataggagagtgatataattatagtttattttgagttttagtgtttttagtgttatttgttgtaggaggtgatggggtaataaggtgtttttgaggttaggcgcggtggtttatgtttgtaattttaatattttgggaggttgaggtgggtggattatttgaggttaggagttcgagattagtttgattaaaatggagaaattttatttttattaaaaatataaaaatagttaggcgtggtggtgtatgtttgtaattttagttattcgggaggttgaggtagaatagtttgaatttaggaggcggaggttgtggtgagtcgagattgtgttattgtattttattttgggtaataagagcgtaattttattttaaataaaaataaataaataaataaaaaataagattttttgggtgtaggtatggtacgcggtaggggtgattgttgttggtgtaattattattttttgggtgtgtgtttgtgggggttgtgtatgttgaaatgtgtggttattttgttggtgattaaggttgttttggttttattgttattaattacgtttattgattttatatggtttattttcgtgtttttatttagagttttttttagtgtttaagttttcggaaggttggaaggagtgagtagtgtagtttttggttaagaattgaagtataaaaattttagtttttttatttaattttaggtgggataaggttgggggtacggtttgtagtttttttatgttgttcggtatgggggttgggtagttatttgtggttataatgagttggtgaggtattttttattggttggattttttgtttggtttatttttatatttaggtattttttggtgtttttttttattgaaatttttgttttaggatttgtttttggagggatataaattagttttttagaattggtttgggttgtttggtggaggagggaggtggtttttggggtaggtggagtaggtttcggatagggaggaggatatagttggggtgatggggaggggtgtgtttttaggaagtaaaatcgtttaaaaggaaaggtttaaaaataggcgtagtgaagttgagcggagtttgtaaagggaagttaggaaatagtagtgttagtggagggcggtttttaggttttttatagagagttatatttgtttagggatagggataacgtgaatagaaggtaaagtttatattaaggcggaggaggcgttttttttttagagagtcgtagttagatagtttaaatttgttaaaggtttgggagggaagaattagggtattattttatttttagtttaattttttttttagttttttttttttttgtttttttaaggttaggtttggttgggttatagtgttagtagttaagattcgtttttagtgtcggtttagttcgtaggaggttagtttggtggttaaaggttattgattgtttaggtttatttgtatacgtggtttaatgattgaggtttgggatttggggttattatttatagtatttttggataaggaggaaaagaattatttttattaatttttggatggaggtgtagggagcgttaatagtatttttgaaaattttaaatgtattaggggggttagtatttagggaagagttataggaggttattttgatggattttgatgattatttttgtttaagtgttaggaggaggtttttttttttttgtttttggtaattttgggtttaagaagttttaggtatttcggaggttttttttgtttattatagttttatttaagaggtttggtttattttgtaatgatgatgtgagaatgagtaggtttgtttagtgttagagtttgtggttggattttcggttgaggttaagagaaataaataagttttttttttttttttgtacgttataggaagagtagttcgttggttgtaaggggattttttattttgtttatggggtatagtagtttatagtattttttttagaaacggagtattggtaggtttgggtttttgtaagatggaatataaaggggtgggtagttgattttaatagttagtttttgggattttaaatttttttttattttttaattttgtgatgttaatttttttttggataaagttttttaataatttggtaagttagtattagttgaattagttttagtttgaattagtagttttttttagtttagttatagttttatttttttagaagggaaaagaagttttacggatttttttataaggaatttttagaatttgttatggtgttcgtaggggatattggtattaattttgggtttattaaatgtagtgggtttaatagtgttttttaaaacgatatgttttaagttttaatttttggaatttgcgaatatgattatatttggaaaacggatttttgtagatgtaattaaggtaagggttttaaggtgagattattttgaatttagtgggttttaaatttaatggtgagtatttttataaaagatagaaaaggagaaagatatatagatagggggagaaagttacgtggagataggggttagagattagagatgatggtgatgcgtttgtaggttaaggaacgttaggaatttttaggagtcgtcggaagttatgtttgtaagtttttaggttgtggtattttgttatagtaattttaggatatagattttaggaatagaatatagaaaagaaacgggaggaggtttagagtttgttgtggttattttagttattttattcgatttttttagtgtttcgttaattttgaagttttttttagttattgagttatcggttttgaaaaggagatatgggtgttttggagttggtttagtttggtaggaggtagtttcgttttattgtttttttattagttattagtttatataggttttttatagtgggtaagtgcgttgttgttttagttttcgtcggttttttttttgttcggttttattagtcgtagagttttttgttgttgttttttttggtttaagaggtttatatatttagtttttttgggataaatttagtttatatttgttgttttatcgtagttatttaagggttttttttattaacgtgttttttaagggatagtaagttatacggtcgttttatttggggttagaattgtgttttattagagtaaggttttggagtaattatatttagggttagggagttatttgtttaagaatagaaacgtgtggtcgggcgcggcggtttacgtttgtaattttagtattttgggaggtagaggcgggtagattacgaggttaggagatcgagattattttggttaatatagtgaaatttcgtttttattaaaaatataaaaaattagtcgggcgtggtggcgggcgtttgtagttttagttattcgggaggttgaggtaggagaatggcgtgaattcgggaggcggagtttgtagcgagtcgagatcgcgttattgtattttagtttgggcgatagagcgagatttcgttttaaaaaaaaaaaaaaaaagcgaaatgtgtagttttttttttttttatttttgaaatatgaaggggaggtgattgtaggttttttgggaaagatttttttattttttttttttttttttttttttaagacggagttttgttttgtcgtttaggttgcggtgtagtggtgttatttttgtttattgtaagtttcgtttttcgggtttatgttatttttttgttttcgtttttcgagtagttgggattacgggcgtttgtttgggatagttacgtagtagtttttgttttaagttatttttttttacgtagagtagaattaggattatagtaaaggttttagaggaggttatcgtttatagggttttgggttttttttttgaaaggtagtttagtttttaagagggtaatagcgattgattcgggacgaaggtttttttgtgtttgttttcgttatttatcgcgtgtttttggtttcggtagttatagggttattttaggcggattttaaagtggcgttaagttgttggatttttttttttttttattaaattagttatgggaatgggagtatttttggtatatttttagatgtgttgtattggtttagcgttttttttattttcgggttttaaattagttgttggttgttttattaggagtagattgaggggaaatgggcggaagtcgtaggggaagagatgtgaggtagataaagaggaagaattttttggttggggtggggtcgttagggtttgggtgggagggtcgtttatttttcgtttttggtggaaggtagtagaagggtgggacggatttgtgtgggagggtttaggtgtggtttgtttgggggtaggagagggattagatgattttttaggtttttttgggttaaagattttttgataaatggttgtcgttgaaggtaggagcgaggttttgggaggtgattgatttcgaaaaattataggttgtagttttgagggttttaaaggttaagtacggagttttttaaaatgaggttttttttagttttaatttatttacgttttttaggtggttttagatatttcgttagggtttttttggtagtttttcgttttcgattttggagatagagaaacgtgatgttggtttttggtttgtttatagttttttcgtttttattatagggtcgttagttatttttttagtttatcgcgtgttttttttttttttttattttcgattttttaataatagtagatttttttttaaatatttttttgtttagatttcgggttttacgtatgttgtttttagaaatgtattttagttttttgcgaggagttagtaaggttgttcggtgtttttttttatggatgggaagttttgtcggggattaggattcggatttggagattttgaggagcgtgttggttagtgtttgttttgaggttcgggatagagttgttaggtataggtagtatcggtgtgagggtttagtttttcggataagtttttttttgtttgtttttagatttgttattgtatatataggcggtgattatttttgatttgtttgggtagagaagttattttttttttttttttcgttttattgtttattaggggaaatgttataagtatttaaaaaatgtaaaaaaaaaaaaaaaaaaaaaaaagcgtttaatattaggggttatttggtttaggtggagtttttattaattacggggttttttgtgttgtggttttaaggcgggtagtcgatggtttttgttcgagttaatatgagttgtagtttaattataggggacggtgattttagggagtagagtttaggtttcggttatagttgtatttaggagttagttgttttttagatttgtagagttaggggagaggtttggaggatcggtattgaatgatatgatttaaagcgcgttaagttgggttggaggtgacggtagagttatagtggttatagagtttttacgtgaatttatacggatttgtttggtttaggttttgttgaattttagggtgaggaggatttggtttttatttttaaagatatgaagaggttgataaagaagagttataggtaaaagggggtggtgggtgtgttgtgtaggaggggtcgtaattggacgtagaagattttagaaggggtaattagagagaggtagtatttttagaagacgggttgtttggttgttttaaatagtttagggtgtgattgaggggattttcggatttagtcggggttttttttgttttgagataacgtattgggaaattttattaagtttatttaagaatttgaaaagttttttggaaatttagcgggtagggcgggtttttgggaggatttttggtatatcgcgagagttagatatagcgagggggttttatatttttgtttagaagttttacggtagaggggtagaagtttagggaggagtaggcgttgagattagaggggtttataagagaggggtttggggtagggggtagttgttgagaagtttaggaaacggcgtttgtttttggggaagtgaagttttgggaatagggttggtgaaggggggcgggaagggggaggtgggggtggagggttaggttagattaggtattttttttagtagtagatttatgagtttttggaatttgtttatagaagtgataagtgttttgtttttagtttcgtttatatatttatttattaagtgtggtagggatagtcgttttttattatttattttgggatttggatttaagtggaggtttttggaggggtagatttaggggaaagggtttttttagaagtagtcgttatttagaggatttgagatgagaattttattacgtttttattagatagaggagattcgcggtgttttcgagtttggttttttattttttatttagtagcgtttttttcgtttattttaagtttagaatattttgttttttttaagattagttgtcgtagtggattgaatagtgatttttaaaagatatgttagagttttagttttcggatttgtgaatgtgataggagttggaatagggtttttgtagatgtaataaaggattttaagaggagagtattttggatttagggtgggttttaaatgtaatgataagtatttttacgagatatagagatatagagaaaaggttatgtgaagacggagtagggagtggcgtgacgtatttatatgtttaggagtattcgggagttattagaagttgggagagaggtttgggtcggagtttttcgtagaggttttaaaggattagtttggtcgatattttgattttggatttttggtttttagaattatttttagtttttaaagttcgtggggttttgttgtagtagttttagtaaattgttacgggggttttttttttttgttaagtttggtatttaaagttttttagttatttggggttaattatattgattttgggatttttaggttattcgtgtgttttatttttttgtttaatttttagtgtttgtgtggttatagtttttttttcgtgatatgagttttttgggtttttgagtgtttatttgttttgtattgaaggttgaagttaaattttggagagaattgattttttttgtgggtagggtaggtattgtgtttttagtatagttagagggtattggttgaaatgtgtttttgtaaagtgttttttttatgttcgtattttttttttaagtggggaagttagagaggttttttcgattttttttttagttttttggggtaggaagtttgtggttatttgttcgtaaggattaggtggatagataattagttttttttaggttatattttattaatagagggttttttaattttgttggtggtttatgagagaaggaaaaattgaaggagttgtttatagtaaattttaaatttttgtgttagagaggtttatggttgagtaaggtatttttatttttattgttttgagttgttaatttagtttagtttagtattgtgatttttgatttgtttgtgggttacgggagtttggtttgttaattagtattttttagatatttattttgtgaagtttttagtggttgagtgttttttcgtttttttcggatagcgtgggttataggggatattgggtaggaagatagttaagtttttattgtttagaaattgtttgggtttattgtagtaatagggatttatttattagtatgaggtttttttgtaggaggggtgggggtaggagggagtttgtggggtatagggttgtaggaggagttatttttttttttattaaatcgtaggttttagttaagttatttttagtatggttgtttgcgtgggaagtttatagttgagggattgtttgtacgtggtatgtaggagttataagcgttatttatattttatttcgggttaggtagatgatttttttggttttagttttttgatgaggaataggaagggttggatcgaaagattttttttagttcggatatggaatgattttacgagggttacggtgaggtttgttttagtttcgtatattagttcgggttagtagtttttaaaggtatagtcgtaggggttttggagtagggataaggaggattagtttattttatttttttgggtagaggttaaggattttgtttttggtttatattttttgtggttaaaaatgtagaagtaagtagtgttggtagaggtatttagatttttgggtaaagtaggggttttatttgatattttaggtttggagtacgagaaaattagtttaggttttaggttttttgattgttagcgattagggaatgtgatatttttcggtttttgtttttttattttttaattttagggggagattaggttgggtgatgtgtttttttttttgatagtaaatttttatttatttttatttttatttttgttttaagagggggttttttatggtcgggcgtagtggtttacgtttgtaattttggaattttgggaggtcgagatggatggattatttgaggataggagtttgagattagtttggttaatatggtgaaattttgtttttattaaaaaatatgtgagttggtaattttaagtttttagtagttttcgaatggaggttttttttttgtaggatttttaaattttataaatatgagtgtttgtaatttagttatttaggaggttgaggtatgagaattatttgaatttgggaggtagaggttgtagtgaattaagaacgtgttatcgttattttagtttgggatatagtgaaattttgttaaaaaaaaaaaaaaaaaaaggtgggggtttttttatgttgtttaggttggttttaaatttttgggtttaaggaatttttttgttttagttttttagagtgttgggattacgggtacgagtttatgaattttaaaaaataatatttattgttttgtttttgattgtaaaaggaatttaggtataaagtcgaaaatttgtaaaatgtataaaaataaagggaaaaaatttataaatttataatttaggtaatttttattaatattttgataaatgtttttttattttttattggggagtgtgtgtgtgtgtgtgtgtgtgtgtgtgtgtgtgtgtgtgtgtgtttaaataggtttatatagtgatgatgttgggtgtttttttttatgtggcgttatgtggttgaggtttttatatattttgggttcgttttttcgatttttttgtagttttgatgttttgattttagatatgttatttttggttcggattgtttaggagaattatttttggattttgttaaaaaatggattgttggtttttaatttttggtggttttggtttaggagggttgggtaagtttgggtatttcggagtgtttttggggcgttgtaggtgtgaatttttgtttttttgaagatttataagttttattttttttattttttttttttttttcgagaattttataagaggaaagtttttattcggaggttgttagggattcggagttgttagtttatagttttattttgtttttattttttcgggagttatttaaggataatgtttagttttagttgttaagttttagttttagggttagttatatattgaaggatatgtagaagtcgtcgtgtgttgggtattgttgaggataaaggtttgaatgataagcgggaataaagttataaggttttaaaatttgttcgaggttttatagttagggtttcggaaatttatgaaaaaagttagtttaatattttgttacggaatataggtaggagagggagtagtttttagttagtttttagttagtttttcgttagtttttttgcgaattattttatttcgggttatagttagggtagtcgtcgtttttttttttgttcgatagtttttgagggtaggagttagtttgtttattattgttttttttttattagggtttggtattttgtttggtatgtagtagaagtttaagaagggtttattgtgtttattttgtaatagttaatgtgtatgagtgtttattatatttgaagatagtgatttatttttgtttttattgtatagatgggaaattgaggtattgagaggttgatgatttttttatattgtcgtgtgggtaagggtaaggttagatgtgagtcggtacgttgggttatcgcgttttttgtttatatttcgttttgggtttgggaaggttattttcggagatttttacgatgttgatatttcgtttagttttttcgtgtatttttttttacgttttttagttatttaaagtattagttaggtagtattgttattttggttttgtaaatttagttattgagtggaagagtagttaggttgaagtggggtagaggtagttttcgttagattttagggtcgggatttttagttatttttattttttaaggattagtagatagagatttttatcgtgtttagttaggggttagggaataggtttttatagtgggggagtgatggatggatgtaggtgcggattgggaggattcgggtcggttttttagcgttggagttttagtagtttaatttattttgttgggttttcgtggggattaaaagatattttgtatataaagtattagtttagggtttggtatttaggaggtgtttaattaaaggaaatggttatgaaaaataataaggagaagtttagttataggaggtgtttgtgggtaaggagagaatagttggaagggtttggatttgggttagagataaagaatgtaagagggagggagggagagaaggagggagggagagaaagagggagggaaagaaagagggagggagagagggagggtagggtaggtaatagttggttttagggtagttgtgtgtaggagtttgttttattatttaaatattaggagagatgtaaatatttgagtgaggtttttttagtttggttttgttgtggttatagttagggttggagaaagagttttttttttattagggttttcgttttgtgttttttattttagttgttttaagattttatgttttcgggttaggagtaggggtttgagagtagtaattaggtagggtagcggggttagggagggatttcgtttttgtttttatttttttttttcgtttttgtttttatttttttttttttgtatagtattgggtttgtaaaggtgcgaatgaaggatttttttttttattcgattttaaggggtttaggcggttaagggttttttttgtagtttagaaaaaaaagtaaagtagttttttttgaggttttttggtggaggtttagggtttaaagttcgttgttataaatttgtagttttttttgtttttttaatagtgttttttttttatttgggttattttattattttggttttttttagttttttaggttttttggggaggaggatagatgtagagtttggatttcgtgcgtagtagggtttttttaatgttgcggtgtatttcgtttggttgcgggagtttgttttatgttatgatttgtgttggtattaatagtttttttttttattttttatttgagtgtcgagggtagttgtgttaggtatagatatatagttttttatatatattatgagtttgtagaaatggtaagagaaggtcgagcgtagtggtttatatttgtaattttagtattttgggaagttaaggtgggcggattatttgaggtaaggagtttgagattagtttggttaataggatgaaattttgtttttattaaaaatataaaaaattagttgggcgtggtggtgcgtgtttggagttttagttatttaggaggttgaggtaggagaatcgtttgaatttaggaggcggaggatgtagtgagtcgagattacgttattgtattgtagtttgggtaataagagcgaaattttgttttaaaaaaaaagaaagaaagaaaaagaaaaaaagaaaaggaaaatggtaagagaagttggttagtattatttgtttggtaaatttttatttcggtttttggttaggaagtttttttttaggaagttttttcgttttatttttttttttgagtttatgtttagatttttagtgtttagaatagagttggtttttggggtatttatggatggttgttggataaataaataagttaattgttttttttatttttagcgatgtttttggtttggtagggtatttagtagtaatgtttttcgagtggattttaaggagtattttttatcgtgtagtttgtattagggattttagttttttattttaaattaaaggaaaaaatttaattttagtaaatatatagagtattttattttttgatttttaatggggggtaagaggtagaggatagaggagaagattatttttttaggtttggtttggagttaaaaagatttgtatgtttttattgtagataatatcggtttttgggggatatagggtaggggtttggtttgtttttcgtagggaaattgtttatttacgtggaaagcggggttaagggtttttgtttggaattagttttttgtatatggggtggggggtggggatagaaggagattttgtttggattgtatggaaatttattagattgttggttgttgatttggtaggagtagagttatttttattttttagggttttgtttgggggaggggagaggttaggtggttttgtttaggttatattttttatggttaggaatgttttttttttattagaaagaaagatgagataggtttattttgaattttttggatataggaagggggtttatttgtggtttaggtggtttttttttttatatttaaggggttttataaggaggtgttaggatttttaggttttgttttagggaattgttgtttgtaaaggttataggtagagatagttaggaatgttttttatgttattggttatgggttggaggttgcgaaattaggtatagaattagaaagatttgttataggttgtaaagggttttagagagttttagttttttagaggggtagtattgtagaaggggtgagaaggaaaaattagtttttaggaattgtttatttagagtttatataatatttaggtggtacgagataacggtttattttttattttattttttcgttgttttttaagatttgagtttttgggggtgtttttagtagatagggggatgtggggtaattgtttttttttaattgtatatttggaggtaatttatatttagatgattttttcgaggttgtgattagagtttggggtaggggaggggaagcgggtggatgggaaggcgagggagatttttttaggaaagtcgttttaggtgtttgtaaggttttatcgtttatatttaaggtataggtttttggttttgaggatataggaaattcgatgttatgtggggaggagggtattgtaatgtatttaaggttaggttttttgattttttggatattggataaatgatggtttttttagttggtttagagatgttaggagtgatagaatgttaaaggttgtagggggatatttagaaattttcgagaaagaagatggataaggaaaaataaaaaaatacgagaagtttagtagagtttgagtttcgtattttcggttttttttatggttacgggtaattttttggagatttagttacgggagtagtggaggtaggtatgggtgggggggggggcgggttttattgtttatggtttcggttgatatcgaggttatttttttgtttttttaagtttttgggtattggtaggatttttaaaaacgataataaatttgaagtttttagaattgtttgttggtttagtttaaacggagtttcggggttttgtagattaaattaaatagtttgagtttagaaatgttttaggcgtttgggggtgtttaggggttaattggtgggtttgtttggttggagagatgataaatttttttatttttgggattgtgttttagagagtttcggattttttggttttataagtaatttagagtttttaaatttgggaaaaattaagagggttttggaaagaaaggtagtgtttgattatttttttttagtggttttgttaagggagagtataggaatttggtttttggttgggtttttgggatgaattaaaataaaaagaaaaagtcgggggagggggtggcggaatcgttcggggttttagtttaggttatatattaaggagattttagaggagtaggttagttttattttcggtacgatgatggacgggtatttggttggttggtaaagggaagagatggtaatagtgaggttttgaatttagtggttaagatttatttttgagtgtgattttttttgatgtttgggtatgtaagaaatgggaggtggagaaaggaggaggagattttagttttgttttttcggtattaggttattagggaatagtattttttttttaacgggtaggtagaggttataggttgttaggttgagaagtttttggtttttatagataaatgtatagtttgtatatttgtattattttgggtgatgtttattacgtacggttattatgtacgttttttattattaagatagtcgacgagattaggtggttattgtgtatcgggtatcgtggtgattgtttgatattgatttttgggggtttaggttttcggtgggtttgtttttttaggtatttagttttttttttattttttgatatttcgggtttagtgtaggggtatgggggtgtttagtggatgggtttacgggttgggtaagtagtacgtagttttggtttattagtttttggttttattattagataagatgagattgttttagttgttagtttagttttgtattatatttgattgggtttttgtagaggtttgttggatgagaatgtttagggtagtaggtattattttttgggatgtatattttgttataatcgttttttagggaaaggttagtttgtagagtcgaacgtaggttgttagcgttttcgttgtttttatggttcggttatttagtaagtgtttattttattgttagcgtttggttttgtagatgggtatatggtttatttatttgtgatattttagggtgggggtgggggtagatggtggtagggaagattaggataattttttagtaagaggaatttgtagttaatatgacgttagtttttagaatgttagttaggtaggaaaaggggggttttatggttgtattgggagtttgagtatttgtcgggtttagagggatttttaggcgggcgttattggtattagtgtttgtcgtgttttttataattagtggtgattatgttgttcggttttatttatatagtggtattatataggtttttgtttgagattttttatttttagatttgtatatttaagtatttaaatttatttgttttttgtaaatgtttttttttttcgtttagatgttatattagtcgcgatatttattatattcgtaggaggtaggattcgtgtttagcgttatgggttgtattttagagttttttagtaatttttaaagagagttgtttttaattttattttgtaggtagggaaataggcgaagaaattgaagaaatcgaagtcgtttagttttttaatggtagagtgagggcggtttgggtatttttatattgttatattttttatttttttaaagtattgtttttttggatgtaaattttgtttattagttttatttaaaatttttttggatagttatagtttatagaaagtatttttagtttgtagttatttagttattgtaggggtgttttggcgtttatttttatttgttttttttcggatatttagtttagagaatttatagtttcgttgtaaggttgattatagtgtatttgttgtttgggtgttgtgttcgtttttttttaaatgaattaattcgtagtcgggatagtgggtttgtttggttttgggttttgaatttaaagagtattaagttagtgttgttagtggttgtgggattcgtgtaagaggtttgtttttattttttatggtttttgttttttattataaaagtttaaattgtagagaggtagtatttataggatgttttgagttttggttgaaaggtagggtttattacgtaagaggtttattggtattaattagggataggtttgtatttattattaagtaacggggtttttttttttagagaggaaagaggtatttgaattttgttagcgcgttagtttttacgtttcggaggtgttgggatttttagataagaaggtatatttatatggttttttttatttagaagttcgttttatagtttgttttgtttttagaatatagatttgggggtttttttcgggcgatagtgggggttcgggagaagtttagatgttatatagttttgggatttgagtacgtgggttttgggttagattgttttaataaatattaaggatttttggattttttttcggtgtgtaaatttggttatagtaaatatcgttgagtaaagtaggttaatagttggtatttggaaaggtttttgttatataaagattcgagttgtaatcgtgtttgcgataatagatttggtttgaatttacgaaagtatatgtcgttcgttagtttcgtgtttttattaattagaagggagaaagaggaaagggttattttttttgttattttattacgggtagtggcgggtgttgtagtcgtttggaggttcgtttgtatagtggaaaagtagaaaatgagattttaaaaattttattagttaaatataaaatattttttttgttgttacgtggcggtttttatagagttttaaaattttgaagttcggagatttattttgaagggggagtaaaggcgggatgcgggaagtttgagtttatggaagatattgatattttttttatttttgggaattttgagtttgaaggattcggtttgaatagcggaaggattgaatttttgtgtaatttatcggtgatggaatataaagttatggtgttttcggtttttaagacgggagggatggggaaggttttgggtgaaggggataggcggggaaggaaaaggtgaagagaaaggtgttttttagggagggggtagatgtgtttaggatatgggatattggtagaattttaatttcgagtatatatataggtttacggacggtttttcgtttatttgttttttacgggtgtgttgtgtcggtttgggtatttgtttttttttttatgttaggttatttgtcgtttattttgtatattgttattagttttaagttttttagaatattttgattagggttttgtggtttttgttataggattttaggtttagacgtttgttcgattggaaaattgtttttagagatgtcgtggtttagagttcgttttgttttggggtggtttttggagttttcgttttttagtaatttatatggtgataggtatttatattcgttggttttaggaattttggggttattattttagcgttgtaaggagttggtagttttttttttattttttcggtttattttgtaggaattaagatattaggtgagtcgtttcgggaaagagatttgtgtttttacggcgttgtttttgcgtttatttttagttattttagatgtttttcgtggattagttgtattttcggcgggtatgtttggtttttcgtagtttggtttatatgatttttataggtaggtttttttttatgttttagttttttttttagttagtttattttagttttttttattgttgttggttgttgttggttagaaggttttttttttttttgtaatttaatttttatttttttttaaggttcgttttttttatattgattttttttttgttagttagtggtgatttttttttattttgattcggaagttgtttgtttatattatttttggttgggttgaattatatttttttttttattttttttaattattttttttttacgtttgtttgtttatttaaggttgtttaatttttatatatatatttttatattttttaattatattttaggttttttgggtattagggagggttatttttttatattttaggttagtttttatgtatatgcgtatttatgtatatatatatttttttacgtttatcgattcgggttatttgatggttttaagattagaatttttagtaaaattatttaggatatataagggggagattgataaatatagggaattagtagattgaggttttatttttcgagattgagaaatttttttttagagttaaaggattgttaattgttgtattaggatggttttaatgagtttattgttttggattaaattatagggttataaaattggtttgggagatagtcgtagaagtagttttagatggaggtatatgggggtaagggtggagttatatttagagatttaaggaaggggtattaataatttttatagtgtaaatggtgatagttgtataacgaatataattttaaattttggttttttttttcgttatagggttttcgttgagatacgagagtttttttttagaaattttattgggggttcgatattttttgttaggaattgagagtagagatttcgatttcgtaggtaggaggagagttttgtataatatagggtttttttttataagggtttattggaaagtggttagatcggttaagtcgtgttatttggatatttgggataaggaaggtttttggaggagcggtcgtagggaggagttgtaaagaggtaggggtagggaggttatatttattcggggattgtaggaggtttaacggaatatagtggatttagggagattttagtatgagtatgtgtttaaagatgtttagatgaggaggtgttgtgggggaggggggcgggaatagtaagtttttttagttttgtagatttagattttttttttttttgggaagtagggatgtaaagggatagagtttgaaaaagggtttttattattaagttgataaagtaattacgatgtttttagtttatattttgtatagcgttagtggttattggattataattttttttcgttttttcgtcgttttatattttttttaggtttagttttgaagaatagttattggtattttgtttggcgtttagttaaagttttggttttttaggaggtttcgttttttttatttagatagggttgattttaggtgggtcgtgtgggtagttgggtttaggatatttagatgttagttttggttttggttatggagcggggaggattttaggttggttattttttagtttggtttgatatttggatagtttgtttattttaatatagtttttttttttttcggtttattagagggttttgtttaagttagtttaggagttttttcgaggggcgggggttttaggtttcggtagaggtaggttcgttttttagaagttttgttttagagcgttggagattattgtgtgagtttttttttcgtttgttgtatttattttcgcggacgtaggacgtagagttttagtatcggtagttaagaggacgtaggaaagcgtacgtatttataggtttagagacgcggacgttagatttaggtttggatagagtagtttcgtaagttttaatatattttgtaaatttcgaagataggagagagttaaaatattttttttgttcgtacgtaggttttttttgttttttacggttcgattttgggaggcggatgaggatatttttaggtttggatgggggttatgggatattttattttagattttgttacgatttgggttgtgttcgttcggtgttttcggtttacgggttgtataatttggcggtttcgaaattggcgtgggggaggggagggttgtttattcgagtaggacgcggttgtttatttagtcggaggtgaggaacgatttttttatttcgttgtcgggtttaagcggggttcgagagtcgtcggggagagttaaagggaggggatcgatggattttttagagtgaaattgtgcgttttggagagtttcgaggtagtttcgcgagttttcgaggaggtcgttgtcgtttggtaaatataaataataataaaaggaaggaaatttaggcggtagtgcgtagaacgagtatagggttttgtgagggcgcgtagggtttacgcgggtgtttttaatagggttttttacgtaggcggcgcgggtacggggtcgggggcgcgcggcgtttttagcgggagggcgtttggattaggggtttcgtttttttttagcgtattttcgtttttttttagcgtattttcgtttcgcgttaggtttattcgtagggttttttttagtacgttcgcggtcgtagtagttagtttagtatttattttcgaagttcgaaatgattttatttagttgcgcgttgatcgcggggttcgatatgatggttggtgggtagcgggtcgcgcggagggtagcggcgaggaagcgttttcggcggggttcgggttttgcgcgttggttggggcgtcgcgttcgcgtttttgtagtgtagagttagtcgtcggaggagtttttaggttttttggtttagttgaatgaatgggggaggaaggcgggcgtcggttttttttcgcgcgttgcgttttcgtttcgttttcgtttttcgggcggattaggttttcgtattcgtatcggtttttttgtttcgtattggttgtttcgttcgtttgttaaggttaggtttggggggttggggttcgagtggtcgttgggggatagttttgggtatacgatcggagcgtttttttttttttcgtttggttcgcgtttaggggacggcgagagacgcggttttagttttttttttcgggcgtttcgttgcggttagatgtgggcggatgtggaggtcgggttatggcgaggagggcgggcgtttagaggggaagagattttttttttttttcgggcgtagggtttttttgtaggaggttgtatttgggtagttaaataaagttttttgttatcgtcgtcgcgcgttttgcgtttgtaagggttaaacggtagcgtacgcggttggtaggtaggatttcggtttgtgggtttaagagtcgaggggcgtagggcgaatatgcgagttttatggtattagcgagaggttattaatttttatttatcgagggtatttttgtagttaatatttttattacgattatcgtttcgggggttatcgttgtatttttttgggtgagttttggagaaggtattgttcgggagaaggggtatagggcggggatggaatacggttgttagagaagttagggacgggcgacgtttttttttttttataataagggttttttgagagtaggaagtagattttgttaggagtagacgttttcgaaggaaggtgtgaaggaaggagttaggtagtgagtgagtagaaagggagttgttttaagggttttttttttttttttgggttttaatttgaggtttagttttttttttaggttagcggtttttatttttaaattatattatttataaggtaggtagggtcgaggggttggggtagatttggggatttgggttagatatagaatttgagaagtaataggtttttatttttaagaagggttttttaggtttgttatttataagagagagaggcgttttttttattcgttttggaaagttagaaatttatttttgtatgttttttttgttatttcgttttttagattttcggtttttgtttagagttaggggttatgtgagaatttatagtatggaataatatttttattttcgaagtagtaggtcgtaacgttataattgtatttcggttttttgaatgtgtggtcggggagcgtttgatagtttattttgggtttgaggtcgttcgttgtttatttgtttttttttattttttttgaaatattttaaatgtgtaggagtgttgagattttttagttattttggagaggcggggggtagggggttttttgcggaaaatgttttaggtttgggtggttttttaagtagatgaaattaagttttttttttttaagaaaagtaggtatttttttttttatgttttggatattttgaattatttttaattaagtgagtttgtggatatgggaattgtaaaattatagatattttagatgcgtgtatattttcgtcggtttgggagttcgggttttagaaatgtagttattgttgttattaatagtatttcgtattttttacgttaggttagggtatgttttgtttgaattttagtatttgggtttatcggatagtttagtttttattgggttatttgtttacgtcgtatttggggatttgggggtttagtatttaagaaatttagtttaataatatagtttttttgggaagatgtcgggttcggtataatagttattttaagttatagtattattttcgagtgtttttttaaaaagtatttggtgagtgtggatatatttatgtaattgtttttttttagggttggtatggagttttattagattagtatagggttagttaattgtatattttttatttttacgtatagtgtagtaaatatatttagttttttggggagcgtcgttagggtgtacgttttattaaaatgggaatttaagggataatggtaggagagtagttagaaagtgcgtatgttttcgtgattgtgtttagagtttatcggttttagttttagttattgtttttttaatgtaattatttagagttatatgattaggtttagaaatttttaggtaaggaggtttttcgagtttttttaggaaatttaaattagggtttggttatatttttagttaggaagtttattttcgtatttaattaattgttttaattgtatattatttattttttttttttttttgtttttagaggagatgggaaatagttgggtattattttttaagttataattattttttttatatttaaggataatttagttgttttttggtttttttttttttagtttaaattatttttttttagttttttaattatatttcgagttgttttttgattatagttaagggttgggtttagtttggggttttaggattttaatgaggttttattgttataggatagtgaggaggttttttattttttttttttagggttttagggtttggatatatagttttagaaggggtattgggtagagaagatgtacgtcggtagtagagaggaaattgagttgaaatttggtaagaataaaagaattataaaggtttgtgtatttagtaaggtgtatttttttacggttataaaagaaggtaagatcgattgtaggtttggttaaagggatcgtttgcgtttttagtgtataacgagatttatagtgggtcggtgattttttttaaaataaagatatgtttatttggaattttaaatgtgatttgattttgtttaagggtttttgtagaaagaatttaggtaaggattttaagataaggtgggttttaaatttaatgttgtgtttttttaagagatagaaaagaaagtatagagatatagaaaaaggttttgtgaagatagaggtagagatcggagtgatgtagttataggttaaggaatatttggggttattagaagttggaagaggtaaagaaaggtttttttttggagtttttagaggaagttggttttgttggtattttgattttagatttttggtttttagaattgtgagaggatatattttttttgttataagttatttagtttcgatagttgttatagtagttaggagaaattcgtgttttatttttatttgtattatgttttgaggttaaagttttatatagtaaagatgtttaagtaattataaattttgtgggtagtttattcgtttagtagattattgttttaagggaagggggatggggatagggaagagagttataggaaatttttgtacgtttttttggaaatgggaaggagtaggtttggagagaaattttataggttaggtttcggggaaatgaagtttataaagcgtgggaacggagtggggaggaaatttacgaggaagtagcgtttggcgtatatatttatatttatgatttttttttaggtatagtttttatggagaggtttagttggtagggaagtaaaagaggttcggagagcgaaggaaggtgaggggtttttttttagtaatattgaggttttagacgggatattttattaggtggtaggttgtgtttttatagatagagattttttaagggtagggtttagatggttttatttttgcgtggtttgatataaagtaggttttttagagttgtcgagttttgggttcgttagtggtagagttttttatagttttttaagtttttatagttttttattttaggaaacggtgttattatttatttagttgtttaagttaagttttcgggtattattgttgattttttttttttttttatttttagtatttaaattatggtgcgtttttatttttagtttttttgcgaattagtttgaattttttttttttagtagtgtgttagttaacggttaataatcggttatttggggttagtaaaagtaataatatttagtttttcgatttgtagcgtttgtttatttttgtggtgttaatatttttgttttggttaattttttttttttttttttttttttgatagggttttattttgttattcggtttggagtgtagtggggtaattttggtttattgtaaattttattttttaggtttaagtgatttttttgttttagttttttaagtagttcggattataggtattcgttattatttttggttaatttttgtatttttattagagatgaggatttattttgttggttaggttggttttgaatttagatgatttgtttgttttggttttttaaagtgttgggattataggtatgagttatcgtgtttagtcggttaattttaagttatttgtatgatattattggaggtgagattgagaagagatgtttagttattacgaatatagtgtttttattatataaatataattttaagaatataatcgtaataggatagataatagttaaatgttgtaaaaaatttaagaggtgatgaaagttgtgtatttattattttttgttttaaatataattatttataagtaattttttaatgttttgtttaattttttttttataatttgtaatttaatttatattgtaaaaatttattatttttttaatagagtaatgtatttttattgtgataaaatatatgtaatataaaatttattatttttggttagttattatggtttacgtttgtaattttagtattttggaaggttaaggtgggtggattatttgaggttaggagtttaagattagtttggttaatatggtgaaattttgtttttattaaaaatataaaaattagtcgggcgtggtggtaaacgtttataattttagttttttgggaggttgaggtacgagaatcgtttgaatttgggaggcggaggttatagtgagttaagattacgttagtgtattttagtttgggcgatagagcgagatttcgttttaaaaaaaaaaaaaataaaaataaaaaagataaatttattattttaattaagtttttatgttagtgatattaagtatatttatattgtatatttattaatattatttattttcgaaattttttttaattttttaaattgaaattttgtttttattaaataataattttttattttttttttttttagttgttggtaatcgttattttaatttttttatgaatttgattttatataagtgaaattatataatatttgtttttgtgagataggtttacgtagtatgaggtttttaaggtttattatttaaggtttatatgtagtgatagaatttcgttttttttgaaggttgaatgatattttattgtgtgtatatatattttgtatatttattttttttatatttgagtaattgagagtaaagttgttataaatatgggtgtgtaaatatttgtttaagtttttgtttttattattttattattattattttatttattattagtattattattattttagatagttttattttgtcgttcgggttgtagtgtagtggcgtgatttcggtttattgtaattttcgttttttagatcggagtaatttttttgttttagtttttcgagtagttgggattataggtattcgttattatgttcggttaatttttgtttttttagtagagatggggttttatcgtgttggttagggtagtttcgaatttttggttttaagtgatttattttttttagttttttaaagtgttgggattatagacgtgagttattgcgtttagttattattttagttttaaatattatagtaatttttttattgttttatgagattttttgagatagtggttttagggattttatatatatttgttcgattttgtgtaatgataaagcgtagttttttttgtagaatggtagagtcgggagatttttgatggggtatgagtttaaaggggtagaggggacgtttagaatatatatggattttttatgtgcgttttgttagttattaagtagatttgttttagtttcgatatgtttaggattatagatagtgtatggtttttatttgggttaagttttcggaattttttttttttttatattatttgtattgggagtagttattaggttgtggattattaagttttttttaggttatttgagtttgtatttttttatttagtttgattgagtcggtgtgtagttattatattttattatattttttgtttggtcgttttaatgtaattataaggttttatttaaagaagtatatgattaatttgttttttagattttttagtgatttttttagtttgttttgtgtagaatatttatagtaaaatttgattatagcggtttgagtttttatttttaaggtaggggattttttaaataaagtattagtgttttaaatttatgattttttaaggaggtttttggtttttagtatagtaaatgttttgttttatggtttttcggttttttatttttattttattcgagtttttcgtttcggtatttgggattgaattagtttggagttttttagttttgttgtttgttggttttgatgatattattagggattgtagtattgtttggattttttgttgttatattttattgtaataatatttaatttgatggaattttgggagtaagtggtaggggtagggatggtggtggttaggggttgtatatatataggatagaaggattgaaggattgggtggaaagtatgatttttttaagatgatttttttttagtagaattttggttgtgttttttgaatagtatttgtttatttgtatatttggtgagttttgtgattagtaaatttagatgtttgggaggttattagcggttttgttgaggtataatttagatatgatagtttatgttttttttttgatttttttttttttatatagttttatgattagagcgttttttttatttttgtttttattttagtttcgtaagatatagtcgtgaaatggttaaagtttttaattttttagtattcgtttgagattggagtataaaaatgagatggggatatagtattttatggatattagtgatggaaaaaaattttttgattttttcgggagttttgtaaagttatattaggggataagaaggagtggttagtttggtatcgatttagttttaaagtagttagtgattaaagtatatagttggtatttttttatttttagggtattaggaggtttggttagaatttatgttagttaggagaaataggttgtttttggggtttttggtgttttggtttttttattgtttttttgaagaaggtattttgttttgtggggtttgaggttggaggtaatttgttatcgatgtagtgtagggatgagggttgagttattagtttgttttagttttacgttagtaggaataatagggatttaagtagagaagaaagtatttatttttaaagttattatagtgattgaggcgacgtggtttttagggagtttttttttttgttggttttttgtggatcgcggttttatgttttaataatgtttttgtttatttcgtaaggtttagtaggtggaaggaaagagggtggaggttgggagtggcggtttggtaattcgggaagggtagggagtaggaatatgtttttttttttttgtattcgtttagaaggttttatagggtttgttttgttatttataattttagggagatttttttttaatgtttgttttataaatgtttatttattttatatttgaatatttttagttatagggagtttagtatttatttatgttatttattttatttttggttgtttaaaaaagaggaaagagagagaaagaaaagataggaaagatagagaaagggggaaagagagagagaggaaagaaagaaagaggaaagaataagataggaaggaaagaaaaaggaagggaacggaagggaaggaagagagggaagaaagagagaaagagagagaaagaggtataaataaggtaggttttatggagtagagatttaataagggagtaaaatatatttgtagttaggttgtagatggatttttataggagcgtatatttattttatttttttcggaatagaaaagtggaaagaagatgtagcggtgtgggtgggtggcggttttttttgggggtttggaatgtggggtattagtttttttggttttgagaaggagattaagattattaatatttatagtggagatcgaattatataagggttggggatatcgttttttttgtatttttaataaagattcgatgttttaattatgggaatttgtggaagaagaaataaaattggttttggggttttttagagaattggttttttatttagtggtggttgtgaagaaatttttggagttagttttagcggtttgggtttgtatagttgagattgtttttggaagttgagtggaagtggggagtttttaggtatagttgggttttgttttttattttagttagtagttttaggatttttgggtgttttagagttttttttagagggtaaatttagagtatgagggagcggggagatgtttaatattgggggatttttgttcgtttttgtttttagtttcgttgatttgaatagggaggttatgggtgtttaggggtagaattgtgggttggtaagtttttagttttggtttttttttgtttttttttttttattgttattgattatttttggttatatgttgatatttttataggatgatggagaagagagaagaggaattttttcgttttgtttagtatattttaaagaggttttagtgtaaaggtatcgacgtttatagttaaatgtgtgtgggggttttttaggagtgggacgtttttatttcgttttagattgttatgaatcgatagaaggttttatgttattaaatatattttattaataaattattttaatatttagtaaaaaaataaataaaaatgtatgtatttcgtgttttgtagtgtttttatgtcgtatttttttttgtatttgagtttcggttcgcgtttttggtttgtcgttttgggaatagaacgttttgcgtgggaggtagataggaagcgcggggtgcgttggttgggtttttttagataatttggtattgttttttttagataatgaaattttttttattttgagtgtttttggaagttagtcggtagttagattaatttaaatgaattatttgttttttttgtgaagtgattttagggatttaatgggtttgttattaatatagtttttttcgtattttgttttttttttttatttttttttttttgtatgagttattggttacgatgattcggtttagttaagggatttggttagttttggttaggttatgtgagagatagtataaaggattaaggttgtcggaattaggttagaggttgagggttatacggattttttggagtgtttgtaattggggatttttaaggttgttttttggttttggggatttgtttatttggggatagttttaagggagatttttaaaagtagggagttaaaagggtgaattaatatagaaatattgagggttagggagaatttgaagatgggttcggttgggtatagtggtttatgtttgtaattttagtattttgggaggttaaggtgggcggattatttgaggttaggaattcgagattagtttggttaatatggtgaaatattatttttattaaaaatataaaaattagtcgggtgtggtggtaggtgtttgtaattttagttatttaggaggttgaggtaggaggattgtttgaacgtaggaggtagaggtggtagtgagttaagattatattattgtattttagtttgggtaatagagtgagattttattttaaaaaaaaaaaaaaaaaaaaaaaaaagataggtttaaggtttggagagttagaagttatttttttatttttgggtggtttattttgagattgtattacgttagagaaagttgcgggagtgtttgtttataatttataagtaatattgttttttttttttattagtttttggttttagtaggtttttgattcgtgttttttttagggttttgggtttttttaagttggattttcggttgttggtgggatgattatgtgatttgttatttttttgtttatcgttttgggtagtttttgttatttggtgtatatagagtggagtttagtaaggtcggggtcgtcgattttttgttagttatatttgtttttttttacgttattttttttcgttttggttatgtttaggggtttatatttttttataagttaggtgttagatttttgtgtttgttttattttgttttttttgtttggtgggttttttatattttttttggtttgatttaggtttgatttgtttttaggttttagtttagaggttgttttttttaggaagtttttttgggatcgttagatgaagggatttttttttggattttttttttatttttatagttttaggaatagtttttaatttaggttttattgagttagtgtggtatttaggagagttataagcgtgtgacgaacgtgttgaagtttttttaaaagttgaaggagttttgtgaatatatagtagtattagtttagattgcgaaggtataggggagttagttttttttagtttcgtttgtttttggttttttttttgaggaggtgggagttagttagttgggattaggaggtgggttttatggagtagagatttaataagggaataaaataaattagagaatttttttgttgtaaggaatttagataaggagtatttagttagaggaggaaggaagagatcggtagtagattttttttgttttagtagttttgtaagttagatgggttaattttttagtatagttgttttttagtatagagaaattttttatttttagtaatagggtgggaatatttttagatagggttacggttattttggttatagggattacggagtttgagtttttgtggtttgttttatttatgtggttatagattttgagtatatatttggagttatagagtttaaagggtagggtagggtagggaatttgtttgattggtgaaggttattttattatttggagtataggtttttgtttttaaatttatatggagttttcgatacggggtatcgattttaaggaggtgaatgtggatatttaaggttagtgaatggttaggtgttaatatatcgataggtttttggttttttttttaatattgagggtaggaaataaatggggtttatatggtgtatatggtttttagagttagtaaggtgtgtaagattcggtagttgagaaaattgattatttggtcgggcgcggtggtttacgtttgtaattttagtattttgggaggtcgaggcgggcggattacgaggttaagagatcgagattattttggttaatacggtgaaattttgtttttattaaaaatataaaaaattagtcggacgcggtggtaggcgtttgtagttttagttatttcggaggttgaggcgggagaatggcgtgaatttgggaggcggagtttgtagtgagtcgagatagcgttattgtattttagtttgggcgaaagagcgagattttattttaaaaaaaaaaagaaaagaaaagaaaagaaaattgattattcgattatgaataagttagaatatttatttagaaaaaaaaaatagttttgtttaattggggatttaaaattttaggatttatgttttttttttatagagttatattatttttttaatgtttattttcgattttatttgtttgttaagttttaggtatttagaatatagtatgatagtaagttttgtgatttttataggtttttttaatttattttaggtatagttatatttttagttttgagtagtagggagtgatatgtagatggttatttagatagagaaagatttttaaaaggagggtaggttttgtttcgtaggtagtatttattgatatagatattagtaggtaaattttttaggaagatttttattaagaaagaacgaaagaggtttagtgcggtggtttacgtttgtaattttagtattttgggaggttaaggcgggtggattattttaggtaaggagttcgatattagtttggttaatgtggtgaaattttatttttattaaaaatataaaatttagttggacgtggtggtgggtatttgtaattttagttatttgggaggttgaggtaggagaattatttgattttaggaggtagaggttgtagtgagttaggattatattattgtattttagtttggggggtaatagagagagatttcgttttaaaaaaaaaaaaaaaaaaaaaaaggatgaaagataaataaggttgaaattggtaggttggtatatttttaataatttattttaggtcgggcgtagtggtataatgttagtattttgggaggtcgaggagggtagattgcgaggttaggagatcgagattattttggttaatacggtgaaatttcgtttttattaaaaatataaaaaattagtcgggtgtggtggcgggcgtttgtagttttagttattttggaagtttaggtaggagaatggtgtgaattagggaggcggagtttgtagtgagcggagatcgtattattttacgttagtttgggcgatagagcgagatttcgttttaaaaaaaaaaagaaataaaaaataaaaataataaaaaaaaaataatttattttagtagggagtaggaggtaaggtttgatatgtagtgtttgttaatttttgtggtgtaaatatatttattgtggtaaattttaagttataaataggatattattaaatatagagttgggaaaagatatgtatattattggataaaacgtttaggtagttacggtttatttttttttgggaaggggggtatgtttagaatgttttttattatggagaatgattgtggtaaatagggtttaattggtaggttgatttaattaattgtttattgatgtgatgtggggtaggtttttgaggttgtttttatgtttagggaagaaggtggttatgtggttatagatttggttttgggtttgttttttttttttttttttgagatagagttttgttttttttttttaggttggagtgtaatggtgtgattttggtttattgtaattttcgttttttgggtttaagtaatttttttgttttagttttttaagtagttgggattataggtgtttattattatgtttagttaattttgtatttgtagtatagatggggttgttggttaggttagttttaaatttttgattttaggtgatttatttattttggttttttaaagtgttaggattataggtatgagttattgcgtttattcgggtttgttattttgaggatatatttggagttatgtgtttatgattttttttttattttaaaattttgattttattttattgtttttagagataggttttgttttgttatttaggttggagtgtagtggtgtaattatagtttattgtagtttcgaatttttaggtttaagcgatttttttattttagtttttcgagtagttggggttgggtttataggtgttattatatttagttatattttatatttttttgtagagatagggttttgtaatttgtttaaattggttttaaatttttggttttaagtaatttttttatttttagttttataaagtgttgggattatagatgttagttagtgtatttagtagttattatgattgattggtgacgtttgttttagttttaggatgaaagagtagtagtattttagttaagtatttgtggtttttgattggaagacgttttttttgttttttaagtatagtgtaaatgttatttttttggtaagtttttttttaattttattttttttttggtatagggtttgttatagttttgtttatataaagagagttattagtgtatgtggtatagatgttagttgtttttttaatatttgagtttttttttttttatagtaattgaagttttggttgtgtatagggaagtttagttgaagaatatattgtttagtttttttgatgataggagcggttatataattgggttttggttagtgggaaggagttgaagtgtttaatttttaggttatgtttttaaaaataaagagggatatttgttttttttttttttttttttttttttttttttggttggagtgtagatatgacggtaggagttggaattattttagtttaagagatggaagttgtgtgtcgaggatgtattaaaggaatgaattaggttcgggttgttttgggtttttataacgattgatatttggattgggacgtgggttcgagtgttgtttagtttttgatgttttagtttttgttatatagttagatggtgttttgattaatttaaggtatggttattattttatttgtttggtagggtaggggttttatttttatacgttgagtttttggtagaatttggtgtaatatatatagttaaagtaaaatgaataggttattttaattaaggtttattttgtgggttggttttggtatttggttttaatttttattttattttatttatttattatttttgagatagagttttatatttgttgtttagtttagagaggagtggtgcgatttcggtttattgtaatttttattttttaggtttaagtgattttcgtgttttagtagttgggtagttgggttttttttgagtagttgggattataggtgtacgttattatgtttggttaatttttgtattttttgtagagatggggttttattatgttggttaggttggttttgaatttttgattttaagtgatttattcgttttggttttttaaagtgttgggattataggtatgagttatcgtgtttagttagttttggtatttggaattggaaaataatagtttgagttttagaggggataaatataaatatgaggtagaaggaatagtaagtaaatacgtgtttagagtaggttgggttgtttatatttttaaaatatcgttaggtgttgaggtttgggttttgtgttagatttttgggtgtagatttcgtggggatatttattgggtagtgggatttttggtaagttatattatttttttgagttttcgttgattaagttgtttattgagaataatatttagattgaaaggatttataataatatgtgaaaagtgtttggtttaaaataggagtttggtaattggtagtttttattatttataatatatagtttaacgttttcgttttataggaatgaaaataggatttagataggtaaaatgatttgttgagggtcgtatagtgttaatgatagagttaggattagggtttggggttttgattttttttgtagtattttggttttgtgagaagtggttttgggtgaatataaggagtgaggagttggtgagaaattttgaaaatgaagttgggtgtggtggtggatgtttgcggttttagttatttaggaggttgaggtaggaggattgtttgagttcgggagttggaggttgtagtgtgttatgattgtattatcgtattttagtttaggtgatttagtaagattttattttagaaaaggaaaggaaaggagaggggaggggaagggagggaatttttgatagtgattttagagataattaggatgatttgaaattattttgaaatgtattaaaaaataaaaataaaatggatttatggttaggcgaaggagggatagatggacggtgaggtgataaagtaggtgtagtttggtgttagtggtagaatttaggtgatggttgaatgtgttttttgtaaaatgtttttaatttgattatgtgttttgaatatttttataatagaatggagggaagagaaaggtaagagggagttattgtagttgttgtagtaggagtagattttaaaatattatgtattagatttttagttttgtttttgtggatgtgtttttgtttttttttttgggatttaaggatatttaatgagcgtatgtgtttttaagtttttttgtttttttatttgtttttatatttggaagattttataggtggcgtgggttagttttttattttgttttttgtgtttttagtgtatgatagatattgagtgagtgttagttttttttttcgatattttgtttgtttgtttagagaggtttttttatagtttagttattaggttgatgtttttggacgtttggtcgatagtttttttagttgtgttttagtgatttggtaggtgttttgagttataaataaggttattagtggatgtttttaaagttttttttattacggcgttttttttttttttattaatagttcgttatgatagttagtttgtatgagtttttttttagggttgtgttttttgaggttgtttagcgtttggtttgttagagtttattagatagggtgtttattttttttaggtttgagtttttatttagagaattatttatagaaggataatggagaaaggtagttggggtattaaatggagtgtgtttgtatgtggggggggaggggagggggagggaaagtaggaagagaagatataagaggagaaataagaataagaggaaatatagaaggaggaggagtagttttttttatgggggtggattttgtgtttagttttttattaaggatattatatttattatttcgtttggtttttacgaatatttttaaggtcgtttttttttggtttttatttttttattaggaagcggaggtatagagtgagaaagagttgtttaaggtttttaggtagtttacggagttattgggagttatatttaattcgtttaattttacgtttttgtttttagttattataataaattattaaggttttatagttataggagtttagttcggagtttttatcgggttttttaaggtagggagatggggttggaggttatgttaggtgtacggtgtttagagttgtttaggaagtttcgcggtgcgggttgggtattaggtagtgtttgtaggatggagaaatgaatgaggttgagatatagtgtcgttttttttaaacgtgattttttttgagtttttgtgattggttatttgagagggtagttttggttttttggcgtttatgttcgggtttagagatgttttttttagttaggtttttttttgaggatggaaatttagaattttattataggaggaagagttgggagtattttattttttttttttttttgagacggagtttcgttttgtcgtttaggttggagtgtagtgacgcgatttcggtttattgtaagtttcgttttttgggtttacgttatttttttgttttagtttttcgagtagttgggattataggtattcgttattacgttcggttaattttttgtatttttagtagagacggggttttatcgtgttagttaggatggtttcgattttttgattttgtgattcgtttatttcggttttttaaagtgttgggattataggtgtgagttatcgcgttcggttagggagtatttttaagatttttgcggagggttgtttaggtttaagttttttattatggaaggttttttagatgcggtagttacggtgtatgggttgagggtttttatttattaagaagtaggagtatttgatgtatatttagtttacgatttttatttatttgggggttgtgtttgtagttacgtgatataagggaatagttatagtagtgggttataaagagagtgtgggttaatgtgtaggggtagaattttgatagttttttatgggttggtagtagggaggggtatatttgtataaattttatacgtatagttttttatatatatgtggttgataattatttatatatttaagacgggatttggcgtatagtttattagtaataggcgttggtaatttttagttgtttttttgttgcggcgtagatattatttaaggtgggatggagagagttattgtttttaaggttatatattttaaagggagatgttgggttacggaatgaaaataggaggattagttagagttattggttttgagttatataatgggatatataggtttatttattttatatttttattgagtaattataacgagttaagttgtatagattatttaaataatcggtacgtagaaaagtattttaatttttttttggttttgacgtgatgggaagaatttggatttttggagttatagagttggatggaaattttggtttagttaattattggttgggggagttcgggtaagtgatttaaggtttttgagtttgtttttttgtaaaagagtagtgttcgggtttgttacgttaggttagggtaagatgattgaagagtaagcgtttagtatcggttaggggttaacgtttttaaggacgtaaagtgtaataagtaggcgttacgattgtatcgttttttattgtttgtggtaaatatataagtaaagatggtttcgcgtttgcgttgggggaggtagggaattggttttaggaggacgttggtttttttagttgttttttttaaagttttttgggaggagaaatgatttattttagttgttgggagttttaatttataagtaggtttgtttattcggtagcggtcgtatgtaggtaggaggggtttcggtagtttttaagagtgaggggtcgtttagtttttttttagttggaaaggaggttttaggttgggtaggagtatttggggaaatttagtttttggagttaggttatattagggagatgaggttgttagaagtttttttggtgtttatagtaaaatataattaaagtgggatttagattttaattagtttaaggtttgatttatattagagggaaattagcgtttgtcgtatgagtgagcgtttatgtgcgtgtaaggtagagatagattttgggtaagtttttttatttttttacgtttgtttttttatttataaaacggggtaatattatttattttatagggttgttatgaaataaatatgtattaatatttgtaaagtgttgagaatagtatttggtataaaataagagcgatagatttgttaaataagtaaaaaataagatataagtttaaagtagagtttggtatatcgtgagtattaagagttgtgttttttgattttttttttttgtggagatttttttattagaagtgggagggattgtcgaggttggagttttgttttagggatttttgtggggagttttttagtttagagggatttgttttacggattatatttgtttcgggttttcgtgtttttgtgtatgtgtgtatatatgtgtgtatatatatgtaatgtgcgtgtgtgtatttttatggatttgtgataatttgtatatatatgtttagaatttatttgatatagtgttttattaagatgttggagtttcgatgaatggattgcggggttgagatattgtttttataggaagttgttttagtagtaagttttttggtttttatagataattaaaaagaatggagtttgtttttattttttgttttaaaaatgatgtatagtgtgtggggtttgatgttggaggtttttttagtagatatatttttaataatattatattttgaaatttaagttgtcgtaaaataagataagtaaagatggtattggtagggatttttgaggttttttttatgtatttttgaataatttttatatggtttttgtttgaatgtttttaggtatggggaatttattattttgtgaaatagtttgttttatcgtttttaagtgaatattgtgagaaaaatatttttttttgtaaagagttaagttttattcgttagtattttttaggtatttggtattagttttatattttgggggaatttaaaataaatgttttttttttattagataatttattaattatttggagatagtggttgtagttttttgttttatgtagttattttatttagtttttttttggaatttttgacgtgaatataagtttttttgttacgtaggttttttttttgggttttttatttatttgcgtatattttggagaggtcgttcgttttgtgggtgagatttattgtgggttgaattgtgtttttttaaaagatatatgtaagttttgattttttagtatttatgaatgtgattttatatggatatagggtttttgaagatgtaattgggttatttgagggtatattgaattagagtgggttttaaatttaatgataggtgtttttataagatagaggtaggttgggtatagtagtttatgtttttaattttagtgttttgggaggtaaagttttattgtttgagcgtaggagtttgagattagtttgggttttcgtttttataaaaaaattaaaaaattagttaggtatggtggcgtgcgtttgtgttttagttatttggaaggttgaggtgggaggattgtttgagtttgggaggttgaggttgtagtgagttatgattacgttattgtattttagtttggaggatagaatgagaatttgtttttaaaaataaattaaaaagataatagagagggtagtttggatagagatataagaagagatatagggtgaaggttaggtggggggtaggtcgagttgtaagtcgaggaatattaggggttgttggtcgtcgtagagttcggagaaaggtatgggatagtttttttcggaatttttaggaggaatgaatttttagatatttcggtttgggatttttggttttagaaattttagggaagatatttcggatgtttttgtttttgtttttgtttttgtttttgagacggagttttgttttgttatttaggttggagtgtaatggcgcgatttcggtttattgtaatttttatttttaaggtttatgttatttttttgttttagttttttgagtagttgggattataggtatttattattacgttcggttaattttttttttttttttgtatttttagtagagacggggttttattatgttagttaggatggtttcgattttttgatttcgtgatttaatcgtttcggttttttaaagtgttgggattataggtatgagttatcgtacgtggtcgatttcggatgttttgagttattttatttgtggttttttgttatgatagtcgtaggatagtaatatagggttttagtagggtggttcggtaagggttttttttttacggtagtttttattttgttttatttgtagggttatttagatgtttatttcggttttggttagtaagtgttagtgtatttttttacgtttagtagtaagggtagtatcgttgttgattaagtatttgttatgtcggggtttttgtgtggttttggggttttttttttttgtttatatttggtagtttagtttttttttttgtattttatttgatgtcggggttttgggtaagtttgggggatttgtgttttattttatagattttttagttgattttattagtttttgtatagggttcgtttgaagggtcgttgggttgggcgttaattagagtttttagtagtagttttttcggttttttgattttggtttatgttttaggggtagggtttttaagggttttggggtcgtttttgaggttagtttttttgttgatcgtagtttatatagaggagggtttaattttgagtgtggtcgttcgtgattttgagagatgtttagagttgtagacgtgttttttaagttttttagagttcgggataggagttatttaatgtttttagtgttataggtaaaatttgttttttttaatataaattgtttttagttttatttaatgttttttttaacgagtagtaataaaaatatggttttttgttaaaggtggggtttatagttttttagaattcggttttttgttaggtttaggtataatttataggagtgttcgtttttgattcgtgtgtgtgtgtgtgtgtgtgtgtgtgtgtgtgtgtgtgtgttgtgtgtacgcgtatatgtgtttgcgtaagtttttttatgtgtagttttgggaagggtggagaggtttacggaaattttttttggtatttagtaagttagaaaaaaggaaaatgagatttgtgtatatatgtgtaagtgtatatatagtatataggtatatatatatatatatttagtatatattatataggtttatacgtgtatatatgtgtaggtatatattatataggtttatacgtgtatatatatgggggtatatagtatataggtatatataggtatatatatttttttgtaggaaagtttttttttgttttttattttgtagggtttttaggttttatgaaataagattgaattttggaagtttgataaaaggtttgtttggagtattttggttatttttattagtttttttagttgtggaaggtatgtttcgtggtatttatttattttttgtttttatttttattttcgttttcgtttttttttttttgtttttttagtttatatgttgtttgttttaattttaatttttgtatttggacgggaattattttttttgtagaagggtgtaatgtatgtggggatatatatatatatatatatatatatattgtattggaggagagaagagaggtagagttttttttagatttagagttttagcgagtgacgggattttttttagagaatacgtgtagaagtttgcgttattggaagaagatattattttgatttatatttttttttttttttttcgttttttttatagagaaggaaaggttttagtaaatagtggttatgtgggttttttgtatgttattggtagttttttagttaggattattttttttttatttttggaagtataagaatagagagaagggtgagtttttgtttttgggggtttttttttgtatttttttggagttaattttagggttgtgggttgtataggaaggagggtttaataggtttttcgtttaattttgtttttttagtgaggagtcgatttattttgtttgtaaaagatgttggttgggatttgatgttgggtaatttgaggagaagagaagggggataggggttgaggttaggtttttggttttgaaatagttataatttttggggtagagtttaagggtgttaggttggagattttatattcggttagttggtagttattattttggtttagttagtggtttagggtattatagttatttagattaggaattttatttttttggattgtattaatgaggaaggttgagtttgtaggttttatatatttatggtaattttaaggtagagaggttattgttaattgagggttacgggtaggagttttgtgagtttattagtaagtttggaagattaaggtttttggttatagagagtagttgttatttggttaattttgtagaaaatattatagttttggataaaatatttgaaagaataaaataataatagtttggagttagtatagaatattttaagtaggtagaagttggagtagagtttatatttgatagaggggaataaaattagataagtttttggtttttggaggtttttttgtttagaggtaggtattgagtaattaaatttggataaaaagttttaaaagtatttagggaaaaataatatgtggtttataggggaatagttagatgaatgttgattttttgatagaaataacggaggttaaagatattggaattttatattttaaagttttgaaagaaaaaattgataatttagaattttataattagtgaaattatggtttaagaatgatagtaggttgggtatagtggtttatatttataattttagtattttaggaggttaaagtaggtagattatttgaggttaggagttcgagattagtttggttattatggtgaaattttatttttattaaaaatataaaaattagttgggtatgatggtatatgtttgtagttttagttatttgggaggttgaggtaggagaatcgtttgagttcgggaggagaaggttggtgagttgagattgggtaggagttttgaaattatattattgtattgtagtttgtggggagatagagtgagattttgttttaaaaataaaaataaaaataaaaaaagaaagaatgatagtaaaataaagatttgtagataagtgaaaatgaaagggaattagttgtttgtaaatttgtattataaaaatcgtgaagtaagttttttaagattatgggaaatgagattagatgggaatttagttttttaggaaggaatgaagagtataggatatagtaaatatatgggtaaatagaaaagattttgttttatttttaatttttttaaaatgtatggggttgtttaaagtaaaaatttttttattgtattgtttagtttataatgtgtatggatgtagtaaatatttaataattattatatataggatggaaagtggtaaatgaatttataggattgtttagtttttatattttttttttatgaagaaaaataatgttaattttaagtagattgtgaaaagttaagaatgtgtaatagaatttataaagtaattattaaaatagtaatataaagagatataattaaaaagttaaaataggtcgggtttagtggtttacgtttgtaattttagtattttgggaggttagggtgggcggatcgtttgaggttaggagttcgaggttagtttggttagtatggtgaaatttcgtttttattaaaaatataaaaattagtcggtcgtggtggtaggcgtttgtaattttagtatattagggaagttgaggtaggagaattatttgaatttaggaggtagaggttgtagtgagttaagattatgttattgtattttagtttgggtaatagagtgagattttgttttaaaaaaaaaaaaaaaaaaaaaatataaattaaaatagaattttaaaaaatatttaattaatataaaagaagttaagaaagtaagatgaaagaaataaatattaaagagtaaggtagtagttttaaatttagttatatttataattatgttaaatagaaatagtttgaatattttaattaaaaggcggaggttgttagaatgaataaaatagtaagatttaattatatattatttataaaagatgttgttttagtataaatataggttgaaattttttgtttggaaaaagatatattgatgttgtttgaatgatgatggagttatgttttgataaatttattataagtggaaaataaatattattttaaaaatgtatttaatatatttaatttatcgaatattttagtttagtttagtttattttaatatgattagaatatttattttagtttatagttgagtaaaattaataaatataaagtttattttataataaagtgttgattattttatgtaagttattgaatattgtattgaaagtgagaaatataatggttttatatatatttaaagtatagtttttattgtatatatattacgttcgtattatggtaaagttgaaaaattgtaagttaaattattataagtttttttataagtttttttagtttttttatgtattttaaatagtatgtttaagaaggttggagaggttatataaatattaataaagttgagtttaagataaaattattacgagataaaggaatatatttattatggttaaatgattagtttatcgagatattattataattataaatgtgtatgtatttaattaaaggagttttaaaatatatgatataaaatttgaaagaattaaagggagaaatgggtaattttataattataggtggagattttttttttttttttttgagacggagttttatttttgttgtttaggttggagtataatggtgtaatttcggtttattgtaatttttattttttgggtttaagcgatttttttgttttagtttttcgagtagttgggattataggagtttgttattacgtttagttaatttttgtatttttagtagagataaggttttattatgttgtttaggttggttttaaatttttgattttaggtgatttattcgttttggttttttgaagtgttgggattataggtgtgagttattgcgtttggatgtatagttggagattttaatattattttagtttatttaggatgttaaaataaaatgttttaggttgggtaatttataaatagattgtagtgtttatagttttagaggttgggaagtttaaaattagggtgtttagtgtttggtgagagttagttttttgttttagagatgttttttttttgttgtgtttttatatggtagaagggattaattttatttacgatgattttgtttttatgagttaatatttttttgatgttttaatttttaatattattgtattagagattaagttttaatatatgaattttgggggatataaataggtaggttatagtaaatattatttttttaatatttgagaaataagtattagataatttgaagaatattggtaattagtaattgatttaattagtagttataaagttttatatttaggaagtttagaatatatatatatattttttttttaagtgaaaatagtgtatttattaagatatatattttgggttataagttttaaattttaaaagtatgtaaaatatgtttgtttggttaaagtaagattaaattagaaattaatagttttaagatatttagaggagttttgattatttgtaaattaaataatatatttttaaataatttatgagttaaagaggaaattataagaaaaattttataatattttaaatgaaatgataatgaaaatatagtatattaaaatacgtaggttgaagttagtgtttagagggaaattgtaagtgtttatattagaaaagaagtaaaaaaaaaaaaaaaaaaaaaaaaaaaaagatttaaggatttgttttaagaatttggaaaaatgggttaggtgtagtgtagtttacgtttgtaattttagtattttgggaggttaaggtaggtggattatttgagattaggagtttaagattagtttggttaatatggtgaaattttgtttttattaaaaatataaaaattagttgggtatggtgggtatttttagttatttagaaggttgaggtaggagaatggtttgaattcgggaggtggaggttgtagtgagtttagattatgttattgtattttagtttgggtaatagagtaggatgtttttttaaaataaaataaaataaaataaaataaaataaaataataaaaaaaataaagaatttggaaaaatatgttagttatttatgtattgttttttaattttgtatatattttgttaggtttcgtttcgtgatattggatcgaggttttatgagtttttttttttggttaaatatagttatgttaggttttatttataggggataatattgtggggagttgttaggttttgttgaggtagtagtttttttttttggttttagggttttttttttttttgaaggtatagttgttagtggcgtgtgtttagtggggtttgttttgtattgagtttttttagtattttagttttagtttaatgggattttagtaaattttttagatatttagtttttgtttatttatattttttagtaggtttttcggttatttagtaagttgattttgtagatttattttttttatattttttggtaagaatttttttgttattagtaggttgtaggtttttgtggtagttatatattttttaataaggtttgaacgtaagacgtggtaaggtgtggaggacgtttcgagtttttggttttttttttattaattttagtggtagtaattgtttttgtgtgtttgtatatatgttttaaagtatttattatagaaaatttattattttaattatttttaggtgtgtagtttggtggtatgaagtatatttatattgttgtgtaattattattattatttattttatttttttaaattgtaattttatttttattaaatattaattttttatttattttttttttttttagtttttggtaatttttattttattttttgtttttttgaatttgattattttagggattttataaaagtgaaattatatagtatttgtttttttatgtttggtttttgttatttagtatgtttttaaggtttatttatgttatagtatgtgttagaattttttttttttttttttttttttttttttttgaggtagttttgttttgtcgtttaagttggagtgtagtggtatggtttcggtttattgtaatttttatttttttagtttaagcgatttttttgttttagtttttttagtagttgggattataggtatatgtttttatgtttggttaatttttgtatttttagtagagatagggtttcgttatgttggttaggttagttttaaatttttgattttaagtgatttgtttatttcggttttttaaagcgttgggattataggcgtgagttattatatttggttttttttttttttttaaggtagaataatattttattgtatagatggattatattttgtttgtttatttattcgttggtggatatttgggttgtttgtattttttggttatgggaaaagtgttgttataaataagaatgtagtatatttgtttaagtttttgttgttagttttttggagtatatatttagaagtggaattattggatgttatggttattttgagtttaattttttgagtaattgttatattttttttatagtagttgtattattttatatttttattagtagtgtacggggttttaatttttttatatttttgttaatatttgttgttatttatgttttggttaatagttattttaaagggtgtgaaattatattttattgtggttttgatttttatttttttgatgattagtgatattgcgtatttttttttgtgttttttggttattggtatgttttttgtggaaaaatgtttgtttattgggttgtttttttttgttttgtggtttagttgtaggagttttttatatattttggatattagttttttatcggatatacgatttttaaatatttttttttattttgtggattttttttttacgttattggtagtattttttgatgtataaaagttttaagttttggtgaagtttaatttattatttattttttttgttgtattttcggtgttatatttaagaaagtattgttaattttaatgttacgaagttttttttttatgtttttttttaaagtagttgttttttatatttgttttttttatattttttagagtttttttgtataaggtaaaataaattttatttttttatttttatttataatatttagtgttttagttttgatattagatgtgtggttttttttcgtcgatttttaagtaattttttaatatttagtagtttttaattgggtgttttgtaatttagtttaattttgatattaattagagttagtgtagattttataggttaagggttttattttataagattgtttttaattttagagattagtcgtaagtggtaagatattaggttatttataatttttgtttgatttggttataaatttgaggtttttataattttttttttaggtttaataatttgtttgagtgatttatagaatttaggaaattagtttatttaaaattgttgatttattataaatgatattttaaaggatataaatgaatagttaattggaagagatgtataagaaaggtatgaaggaagcggtatggagtttttacgggagggtatattgtttttttagtatttgtaggtatttaataatttgaaattttataaattttatttttttgggtttttagggaggttttattatataagtatgatatgaaatttttggttattgatgattaatttaatttttatttttttttgtttcgtaggaggtggatgggaaaggttgtaagttttagttttttaattataaggttgggttttttggtaattagtttttatttttaggttgtttaggagtttttagttattagtcgtttttttagtaaataaaaagatatttattattttggagattttaagagttttaggagttatatgttaaataaagttgggggatagagattagatagatagatagatagatagatagatagatagatagatagatagatagatagatatattgatttttgagatagagtttttttttgttatttaggttggagtgtagtagtgtaatttcggtttattataacgtttgttttttcgggtttaaattatttttttattttaattttttaagtagttggaatcgtaggtatatatcgttacgttaggataattttttgtatttttggtagatatgaggttttattatgttgtttaggttggttttaaatttttgagtttaagggattcgtttgttttagttttttaaagtgttgggattataaatatgagttattgtatcgagtttagtttaaatatattttttttatattataatgttatttttttgtgatttttttaatagttaattattttttatagttaagaatattttatattataagttgttatttaaattgtcggtgtggtttttgttttttgattgggttttgattaatgcgttgaagtaagtataaggaaggaagtaatgaagataatagagaaatttaaggaaatggatattagaaaaggggagtttaatgttggttttttaaaaagatttagattgataattttttagttaggttgttgatgagagggagatggcgaatataaagttataataaaaggaatgaagtgttttttttacggattttatcgatattatagtgataaggaatataggtatattttattttattgtgttttatagatattgtattttttataaattgaaggttcgtggtagttttgtattaagtaagtttgttggtattatttttttaataatatgttaatattgtgtttttgtgtaggagtttgatgatttttgaaatagtttaaatttttttattattattatatttgttatggtgatttgtgatttttttttttttttttttttttttgtttttttttttttgagatagagttttgttttgtttggagtgtagcggcgcgatttcggtttattgtaagtttcgtttttcgggtttacgttatttttttgttttagtttttcgagtagttgggattataggtatttattattacgttcggttatttttttcgtatttttagtagagacggggttttatcgtgttagttaggatggttttaattttttgattttatgatttgttcgtttcggttttttaaagtgttgggattataggcgtgagttattgcgttcggttttttttttttttttttgagatggagtttcgttttgttgtttaggttggagtgtagtggagtgtagtggtgtgatttcggtttattgtaatttttattttttaggtttaagcgatttttttgttttagtttttttagtagttgggattataggtattcgttattacgtttggttaattttggtatttttagtagagacgaggttttattatgttggttaggttggttttaaatttttgattttaggtgatttatttgtttcggttttttaaagtgttgggattataggtatgggttatcgcgtttagtgattagtgatttttaatgttattattgtagttgtttttggggtatgacgagttatatttagataagatagtgaatttatttaataaacgttgtatgttttgattgttttattgattggttgtttttcgttttttttttttttgtttaggtatttttattttttgagatttaataatattgaaattaggttaattaataattttataatggtttttaagtgtttaagtgaaaggaagagttattcgttttttattttaaattaaaagttagaaatgattaagttgagtgaggaaggcgtgtcgaaagttaagataggtaaaagtgagattttttatgttaaatagttagttaagttgtgaatgttaagaaaaagttattgaaagaaattaaaagtgcgattttagtgtatatatgaagaagaagaaagtaaaatagttttaatgttgatatgaagaaagtttgagtggtttggatagaagattaaattagttataatatttttttaaataaaagtttaatttagggtaaagttttaattttttttaatggtatgaaggttaagagaagtgaggaagttggagaaggaaagtttgaggttagtagaggttaggttatgaagtttaaggaaagaagttatttttataatgtaaaagtgtaaggtgaagtagtaggtgttgatggagaagcggtagtaagttatttagaagatttagtttagagtattgatgaaggtggttatattaagtaatagaattttagtatagatgttttattttttattggaagaagatgttatttaggatttttatagttagaggggagaagttaatgtttgtttttaaagttttaaaggataggttgatttttatgagaggttaacgtagttgttgatcgtaagttaaagttaatatttattgatcgttttaaaaattttagggtttttaagaattttgttaaatttattttgtttatgttttagaaatggaataataggttttatttgatagtatatttgtttatagtatggtttattgaatattaaaaatttattgaggtttggtgcggtaatttacgtttgtaattttagtatttttgaaggttggggcggggggattatttgaggttaggagttcgagattagtttggttaatatggtgaaatcgtatttttattaaaaatataaaaattatttaggtatggtgttatacgtttgtaattttagttatttgggaggttgaggtaggagaatcgtttgagtttaggaggcggaggttgtagtgagtcgagatcgtgttattgtattttagtttgggtaatagagggagattttgttttaatttgaaaaaaaataaaaaaataaaaaagggttaagtacggtggtttatagttgtaattttagtattttgggaggttaaggtaggtaaattatttgagtttaggagtttaagattagtttggttaatatggtggtgaaattttatttttattaaaaatataaaaattagttaggtatggtagtgtatatttgtagttttagttatttaggaggttgaggtaggagaattatttgaatttgggaggcggaggttgcggtgagttgagatagcgttgttgtattttagtttaggtaataaagcgagattttgttttaattaaaaaataataataaaaaaaaaataaatagggttcggtgtagtggtttatgtttgtagttttaatgttttgagaggttgaggtaggtggattatttgaggttaggagttcgagattagtttggttaatatggtgaaattttgtttttataaaaaatataaaaattagttaagtatggtggtgtgtgtttgtaattttaattatttaggaggttgaggtataagaattatttgaattcgggaggtagaggttataatgagtcgagattatgttatcgtattttattttgggtgatatagcgagattttattaaaaaaaaaaaaaaattattgagatttattgtttaggaaaaaagaatttttttaaaatattattgtttattgataatgtattttgtgatttaagagttttgacggagatgtatgtaaagatgaatgttgtttttatgtttgttaatgtaatatttattttgtagtttatggagaagggataaatttgatttttaagttttattatttaagaaatatattttataaagtagtatttgttatagttagtgatttttttaatggatttgggtaaagtaaattgaaaattttttggaaaggattttttattttagatgttattaagaatatttgtgatttataagaagaggttgaaatattaatattaataggagtttggaagaagttgattttaatttttatggatgagcggtttaagattttagtagaggaagttattgtagatgtggtggaaatagtagagaattagaattagaagtggagtttggagatgggattggattgttgtaattttatgattaaatttgaatagatgaggagttgttttttatggatgagtagataaagtggtttttggagatgggatttattttaggcgaagatgttgtgaatattgttgaaatgataataaaagatttagaatattatattaatttatttgattaattcgtggttagggttgaaagaattgattttaattttgaaggaagttttattgtgggtaagatgttattaaatataatgcgtgttatagaaaaattttttatgaaagaaagagttaatttatgttaaaaattttagttaagaaattgtcggttaggtgtagtggtttacgtttgtaattttagtattttgggaggttaaggtaggtggattatttgaggttaggagtttgagattagtttggttaataaggtgaaattttgtttttattaaaaatataaaaattagttaggcgtggtggtaggtatttgtagttttagttattcgggaggttgaggtaggagaattgtttgaattcgggaggtagaggttgtagtgagttgaaatcgtgttattgtattttagtttgggtaatagagtaagattttgttttaaaaaaaaagaaaaagaaaaaagaaataaagaaattgttgttatagttatttttaatttttagtaattattatttggttagtagttattaatattgaggtagattttttattaagaaaaagattatggtttgttgaaggtttagatgattattagtattttttagtaaaaagatataatgattttatatattttaatagattatagtatagtgtaaatataattttttttttttttttttgagatggagtttcgttttgttatttagtttggagtatagtggtgtgattttagtttatcgtaatttttattttttaggttcgagtaatttttttattttagttttttaagtagttgggattataggtatgtgttattatatttagttaatttttgtatttttaatagagatgaggttttattatgttggttaggttgtttttaaatttttaattttaaatgattcgtttattttggttttttaaagggttaggattataggtatgagttattatgtttggtttaaatataatttttatatgtattgggaaattaaaaagtttgtgtgacgtgttttattgtaatatttgttttattgtcgaggtttggaagtaaattttaggtatgtttgtattacgaataattttaaatgagtaaatttaataatttatttgaaagggataaatttttttaaagtataatttattaaaagtaagataaggggaagtaaaaaaatttgaataattttttttatatattaaattgaatttgtgattaaaaataaataattattttttttagtagaaaattttaggtttagacggtttttttggtggattttattaaatatttaaggaagaaataatattaattttatgaaaatatagaaaataaagagaagggaatatttttaaattaattttatgaagttaaaatgaggttgataaagatattatcgaaataaattaataaataaagaaaatattatattaatattttttatgaattaatacgtaaaaatttttaaaaattgggtaaattaaatttagtaatatataaaaaggatgatattttataagtaagttggattttttttagaaatgtaaggttggtttaatattaaaaaattaggtttgtatagtggtttatatttgtaattttagtattttgggaggtagaggtgggagtattgtttaagtttaagaattgtagattagtttgagtaatataatgagattttatttgtataaaaaattttaaaaattaaaaattagtttggtatggtggtatgtgtttatagtttttgttatttaggaggttgaggtgggaggattgtttaagtttaggagtttaggttgtagtgagttacgatggtattattgtgttatagtttgggtaagagtgagattttgtttttttaaaaaaaaaaaaaaaaaaaacggggggtaaaaattaattattgtaatttattttattaaacgaataaaagataaaataatgattatttttatagatgtagaaaaagtatttattaaaattatatttatttatgttaaaaaattttagtaaattaagaatagaagggaatttttttaatttgataaaggttatatatgataaatttaaagttaatattataagtttggtataggtaaggatgtttattaattattattatttaatattgaattggtagttttaattagtgtaataaagtaagaaaaaaaaataaggtattaagattagaaagaagtaaaattatgtatttaaattttaaaagatttataaaattattattagagtaataaatgattttggaaaagattataggatataagatttatatataaaaatttattgtatttttatatattagtagtaaataattaaaaatgaaatttaaaatttattttagtttaaaatagtgttaaaagtaaaatttttaggaataaatttaataaatggtatgtaagattttttttttgaaaattataaaataatgtaattttgtagagatttttttttagtagagaaataaaagaaatataaaaggatttttaaaacggagatatattatttatataaaagatttaatattgttaaaatgttaatttttttttaattgatttatagatttaatataattttaattaaaatttatattgtatttttgtagatattaataagttattttttaaatttataaggaaatttaaaggatttagaatatttaaagtaatattttagatatttgagagattttatattaagatttattgtaaagttatattaattaagatgtggtattagtaaaggaatggataaaatattaagaaaatataatagtgttttaatatagggtttatatgtatatagtatatatattaatataggattatatatatagttaatataggatttatatgtatatagtatatatattaatataggattatatatatagttaatataggatttatatgtatatatgtatatatattaatataggattatatatatagttaatacggggtttatatgtatatatgtatatatattaatataggattatatatatatatatagttaatatagggtttatatgtatatatgtatatatattaatataggattatatatatagttaatatagggtttatatgtatatatgtatatatattaatataggattatatatatagttaatatagggtttatatgtatatatgtatatatattaatataggattatatatatagttaatatagggtttatatgtatatatgtatatatattaatataggattatatatatagttaatatggggtttatatgtatatatgtatatatattaatataggattatatatatagttaatatagggtttatatgtatatatgtatatatattaatataggattatatatatagttaatatagggtttatatgtatatatgtatatatattaatataagattatatatatagttaatatggggtttatatgtatatatgtatatatattaatataggattatatatatagttaatacggggtttatatgtatatatgtatatatattaatataggattatatatatagttaatatggggtttatatgtatatatgtatatatattaatataggattatatatatagttaatacggggtttatatgtatatatgtatatatattaatataggattatatatatagttaatatagggtttatatgtataaatgtatatatattaatataggattatatatatagttaatatagggtttatatgtatatatgtatatatattaatataggattatatatatagttaatatagggttgatatgtatatattaatataggattatatatatagttaatatagggttaatatgtatatacgtatatatattaatataggattatatatatagttaatatagggtttatatgtatatacgtatatatattaatatagggttatatatatagttaatgatttttagtaaaggtgttaggtaatttaatagagtaaggtatgtttttttaataaacggtgttagaattggatatgagtatagaaaaataagaattaattttgattttaaattaaatataaaaattgatttaaaatggattatataatattttgacggttataataggttaaaaaatgtaaaaatttaaaaaattaaaaaataaaaggaattatagaatatataattataaaatttttagaaaataagagaattttttttgattttagtgtaggtaaagattttttttataggttataaaaattataaatcgaaattggaaaaagttgataaattggattttatgaaaataaaatatttttgtttattaaataatattattaagaaaattaaaaggaaaggagtaatgtggaaaaaaaaatttatgatatatatatttgataaaggatttatatttagaatatataaaaaatatatgaaataatatttttttttttttttttttttgagatagagttttgttttgttatttaggttggagtgtagtggtgtaatttcggtttattgtaagtttcgttttttaggtttatattatttttttgtttcggtttttcgattatttgggattataggcgttcgttattacgttcggttaattttttgtatttttagtagagatggggttttatcgtgttagttaggatggttttgattttttgatttcgtgatttgttcgtttcggttttttaaagtgttgggattataggcgtgagttattgtgttcggttaattttttttttaaatgagatttatggggaaatagttaaatgaagaaataataaagtagtaataaaataaaatttaagttttattttattgtgtagttgtaggataaagagtagaagtttgtagttggggaataaggtgtttatttttttaagtattataaaatgaaggttttagaaattattcgattttgaaataatataattttaaaaagaagtaagacgtggatagataattttataaaggaaaatacgtaaatgattaataaggattttggaaaattgtgcgattttataagttattaagaaaatataaaataaaagttttaaaaaaaaatgaagtttggaataattgaataaatatataaaacgataataaaatgaattttgattttttattttatattatatgtaaaagttaatttataaaagttatataattttaagttttttaaaggaaaatataaatatttttgtaatttggtagggtaggtaaaggttttttataaagaatatagagagagaattataaagaaaggagtttgttaaattagattttataaaaattaaagtgatatatttttgtttattggaaaatattattaagaaaatgaataggtcgggtatggtggtttatgtttgtaaaatcggtttttggggaggtagaggtaggaggatagtttgagtttaggagttttagatttgtttgggtaatatagcgagattttgtttttgaaaaaggaaagaaaatgaataggtaagttatagattggaataaaatatttgtaaaatacgtatttgataaaagattagtatttagaagaaaaagttaagtaatttaattttaaaatgagtaatagatttgaaaagatattttataaaggaaaaatatatgaagagttaattatgaaaatgtgtttaatcgtattagttattaggttaaagtaaattaaagttataatgagatgatattattatacgtttattagaatgattaagattttatagagtgatagtattaaatgttggttaggatgtggagtaattagaattcgtatttattgttggtgggagtgtgaaatggaagggttattttgggaaaagatttggtagttttttataaaattaaatgtatatttattttatatttattttaggtgtttttatagaataaatgaacgtttatatgtatagaaaaatttgtataagaagaattagcgtaataggtttatttataagagtttttagatggaaatagttaggggttttttaataagagaatgattaaaaatttatagaatgtttatatagtggacgttatttagtaataaaatagaataaatcgttggtatttgtagtaatatgggtagttttaagaaatatttaaattggtaaaattatttcgtggtggaaaaaaagtataattgtggttgttttggggaaggtggggattgtgatgtatttggaggggtatgaggaatttattggggtgatagtgatgttttatgttttggttaggttgggatatacgtggatatttttgttaaaatttaaagaacggaacgttttatatttgtgtattttagggtatatatattttattttaaagaaaaataaaaataattatagataaatgtcggattttagttaatgaaatgtaaattgaggtgttgataggatgttgtgtgttgatttttgtagtttattttaagtgtattaaaattagcgtggatgttggtggttagagggatttgtggtgaagtaaatagtaaaatggttgttgtggaatttaggtggtaggtgtatgggtgtttattttagaattttttatggttttttttttgtggttttgttttgttttgtttttgagatagggttttgttttgtcgtttaggttggagtgtattggtataattttagtttattgtagttttaattttttaggtttaagtaatttttttattttaatttttcgagtagttgggattttaagtttgtattattatgtttgattaattttttgtattttttatagagatgggattttattatattgttcgggttggttttgaatttttgggtttaagtgatttttttattttaattttttaaagtgttgggattatagttatgagttattatatttagtttttttttattttttttatgtttgaaaagttttacggtaaaaagttggaaaaatgtaaaaaagattgaaatttattaattaaaaataggaaaaataaaataaaagagatggtaggagattattttttttttttttaatttagtttttaatttttttttttttcgtttagttaggataggaattttaagggttcgggtttttcgtgtttgtgcggggaaggaggtattttcgtgtttgtgcgggggttggttatttgtttttcggtgtattttttgtattttattttttttcgttcgtagtgagtagttatagttggcggaaattatatttaggtagtttttgtttataaatttagtgaaaatgtaaatttcgtaggagttggattttcgagagtttgcggcgttatttgttggaggaaaggttttttgtattcgagttttttttttttttttcgttgttattcgtttttttgtttaggttgggcgggttttttttttgtaatttcggggtattggtgtacgggaaatgtttagtgttttataatttttttttatttatattttaatatttagtttttagtggatatcgttttcgttcgataaatatattatataggtatagtttaagattatttattttaggaggagtataagttttagtgtttattattttagtttttttttttttttttttgacgtagtgatataggtttaggatattgaagatttttgattttataaatatgttgaagttaattattttgaagttgtagtttttattattattattattttttattttttgtaaagataaagttttgttatgttgtttagtttggtttggaatttttggatttaattgatttttttgtttcggttttttaaagttttgggattgtaggtgtgagttattgtatttagtttgaagtcgtagttttttaattattgttaatagtaatatttatttttttgtgagtagtagggtttgttggtatggttgatagttttgtattattgtatcgaatttgttgtttgggattttaggtgagtttcgatttttagttggagggataagttgtgtggggttgggtagggtgaattgcgggagattaagtttagattgagggttataagttatatgagtattggggttaggtagggatagtgaaggagatagtgtaattttgaggaaagataacgttatagaatggagaggtttaggttcggggtttttttttgttgtcggataggtatgtttgtgttttttttttagttttcgtgatggttaagttatgtgttttttgagaggtaagcgaggtttttgatagtaggttttaggttttaattaaattgtttgttttgtagggtgagttgtataggtgtttttattttcgatttttttgaatttttgttgtttttaagttttatttattttttttaggtgaatagaaatattgtttaggggagaacggaggaagaatttaggaaaggttgttcgagagtttggttgagtttacgttatcgttaagagtagcgttaaaatttaggagttggtgagattatggtttagggtttatattaatatgagggggtgttagttttatgattaatgagtttttgttttattattttttgttatttatattttgagggttatagttagtacgtgaattggagttggttttcggtatttttttttttatattagttttataatgtgaggtgggggttcgtttttagaggtattcggagtagtaggtgttttaagagggggaagttttttcgaagtttttttttatttacggtataggacgtagaggggatagagtattaggaatatttagcgattataggggtttgtttcgaaggagaggaggtaggaggtagggagagtggttgggaggttagttttggagtgtttattttttatttcgagggagaggaaggaagtagaaggtgagtatagggagttttagttggggatggagcgggggttgtagttcgattgtgttgtttggagcgggggtatggattgtagtttttatttatttgtttggttagttcgaagttattttaagtttggagattttatttgttttgtttattttttttagggatggtgtttaaatttcgaagttttggttggtgttgtaaatatgggagggaggttttgttttattttagttttaagagttagttaagaatgttttggatatttgaattttgtttcgagttagaggttgggaagaaatttgaaggatggtgggacggtggatagtagtttttaggtattaggtattagggtttttgtttggggatgggggtattagtaggtgttaagtgtattatattagggtttattatgtttttgtttagagatttagtattttacgaaataggaaggaacgagggatgagcgtgtttttttttttaatattttagtttttgttttgaggttgttaggtatttaatttttttaggatttaaattattttggttttatttacggttaagtgtattaaattatagttaggattattgggtttagatattaaaagcgttttttttaaagtcggtagttattagggtagtatagggtagtgtaaggttgggtagggtcggttatttgttagtatttagtggtttttgttggatgttgacgggggtagttaggtaggtgggtttatttagtaattaaagagattttttttttttaattttttttttaaagagattttgattttttttttttagttgtagggtttgtagtagttttttttttagtaggtttttttgtttgtttttggttatttttagtagttatagggtattgaggttttattatagtgagaataaaattaagtttttattagggtttttaaggttcggtacgatttggttttgtttgtcgtattggtgttattatggttcgtttttgaaaatatattttagttatttttattttttttaggttttagtttcgggtttttatatttgttgttttttttgttaggttgttttttttttggattttggtttggttgggtttttttggttattatagttttagtttagtgttattatttagaaagggtttttattaattttttcgttatatatatagatatgtatttttagtaatttgtttttagtttttttatagtttttatttaaaattatttatggatttgtttatttgtggattgttttttagttttaattgttaagtaataagcgattagcgattgtgtttttgttgttttttattataggttaagtatttaagagaggggttgtatatagtaggttttaataaatatttattagacgggttaggtacggtggtttatgtttgtaattttagtattttgggaggttaagttgggtggattatttgaggttaggagatcgggattagtttgattaatatggtgaaattttatttttattaaaaatataaaaattaattaggtatggtggcggacgtttgttattttagttatttgggaggttgaggtaggagaatcgtttgaatttgggaggcggaggttgtagtgaggcgagatggcgttattgtattttagtttgggtgacggagtgagatttcgtattaaataataataataaaatatttgttagaagaattaaagtagtttgtttgtgtttaataggaatttaagagtataagatgaatttaattaaaggatatatatagtaggtattttatagttgatatttgttggtggagggagattaggaaagtggggagaggtagtgtttgggtatggggatattttgggtatggggacgttttggatatagggatatattgggtacggggatattttgggtataggacgttttgggaacggggatattttgggtacggggatattttgggtatggggatgttttggatatagggatattttgggtacggggaaattttgggtatggggatgttttggatatagggatatattaggtacggggatattttgggtatggggatgttttggatatagggatatattgggtacggggaaattttgagtatcgggatgttttaggtacggggacgttttttgttatttgaaatttcgtagttttattatattcgtttgttttagtaaatcggtttaaagagtatttttaagtttttatggtaaagttttagagttagtgttttttcgttgatttcgagggtgtgttgtttatttagtgtttaagttagagtttttttatttagaaaaaaaaagaggagggtggttttacggatggaggtatgagggcgtttataggtagagggagttttcgggttgagatttgcgttattttttgttttaattttaaggcgtagtttggagtttaaattagtttttaaacgtgggtcgttggttaagaggaatttttttatttacgatttttttttatatttagtttttattgtttagagtatgttagttttgtttgttttggtttttaggatttttttagggatttttaggttttaagttagggtgggtttgaattaaggtagttttagaatttatgttaatgtttttgttagtgggagattttggggagtatcgtgcgggatgtatggggttaggcgggggtatatagcgagcggttttagaagttttggtcgttcggagtgggggggtgtttagagtaagagacgggttaggaagttggagtgagtaaggaggttttagtttttggtgggagtaggtcgggtaaaaataaattaatttgagggtagtagttagcgagattattataggaggggtggtggggtcggaggggttttaggagtttaggagagggaggtattgttagaggtaaggtcggtagatgagagttagtgttggtaggattaatttgttatagtagttatggtttattttttttttttttttttatatatgtttttggggtttatggaatttattagtttattataaaggatattataaaggatataggggaagagatgtgtagggtaaggtatgggggagggacgtagagtttttatgtgttttttaggcgttttattttttaggagtttttatatgtttatttatttagaagttttcggaattttatttttttgagtgtttacggaggttttattacgaaggtatgattgatttaattattggtcgttgatgatttgtttaatttttagttttttttttttatttggaggttgcggggtggtgttgaattttgtgattttatttggttttttttgggaattattttgaagttgttagttggtttgttaattatgagtatttaaaaagatattattttggagattttaaggattttaggagttgtgtgttaggaaatggagatgaaaattaagtgtatattttataatatgatagttagttttttttaattttagttttattttttgtcgtgttgtcggttttagtttttcgcgttttagggtttttgaatatattgtcggttgtttgtagcgatcgtttttgtttgttgggtttgagtttggtttattttttttatttttttgcgtttagttcgaaggtgttttttcgaggtagtttttttgatttggttttacgaatcgtaggttttgttttgttattggttttttttgttatatttgttattttttgtgttttacgtttattgatgtggttttgtatttgtgtagttttatgagggtaaggattgtgtttggttttgttttttacgggattttagcgttaagtttatagggagtatttaatgttgaatgaatgaatgagtgatcggtaagggaggtttattttgttatgttgggggttaaaggttgttgggcggattatatgggtgaggttgggtggggagggaagtagagatgattttttggaagaaggggtaggaggcggggaggtgggtgtggggtgttgtataaggatggtaagtgtttttaggggtgataagttaatttagagtattaggtagtagaaaaaggttgatatttttacgttttatttttatttagggagaggttaggttttcgggaaagttagtttttcgttgttaggagagttttaagggaagttttattagttgttgagttggttatagtggaaatttatgtggtgggtgggaggggtttgaggtataggggtttgggtggtggttttaggatggagatttgtgtttagattatgaggggtggttttagggatgattatttttaaataggaagtagataaaggtatagatggtagaagcggaggtagagaatgggttgtaggggtttttttagagggagagtcgagtaaggggataggttggaaatatttagtttttatggtttgaagtatagatagttggttttatacgtaggtcgggtagttatattatttagaataaggggtatgttcgtagggtaggttttaggacgtttcgggttggttttgttattagtttagaaagacggtttaggttttttcggtagggagtacgtttagttaggttttgggtaggagttgagattttttggttggtttgagaggggatgatcgagtgtaggtttagttcgggatttttttattttttttcgttatttagcggaattagttgggcgtgagaaaagaagagaagtgaattaagagtttagagtatgaggttggattagtttttatattatatgtaaaaattaatttaatttgtattaaagatttaaatttaagagttaaaattataaaatttttagaagaaaatataggggaaaagttttttgacgttgtatttggtaatgattttttggatatggcgttaaaagtataggtaatagaagaataaatagataaagtggaacgttatagaagtttaaaatatttgtatattagtttgggtgcggtgatttacgtttgtaatttcggtattttgggaggtcgagacgggtggattatttgaggttaggagttcgagattaatttagttaatatagtgaaatttcgtttttattaaaaatataaaaattagttgggtgtggtggcgggtgtttgtaattttaattatttaggaggttgaggtaggaaaatcgttggaattagggaggcggaggttgtagtgagttaagattatgttattgtattttagtttgggtaatagagttagattttattttaaaaaaaaaaaaaaaaattgtatattaaagggtattaataacgtggggagaaggtaatttatggaatggtagtaaattataggttagatatgggattagtatttggatattaatttatagattttttaatatttagtaataataattatttaaattaaatataggtaaaggatttggatagatatttttgtaagaatatgtgtaaatgagtaataaatacgaaaagatgtttaatattattaattattggggaattgtaaattaaaattataaggagagattttttataattatgagttttgggtaggtaggaagacgtttggtggggagttgtcggttttatgttgtttttagaatttttgtaggggttaagttcgatttcgatattttattaggagtatagaaacgagtggaaaaggttaaaggttattttaaagggttagaggggtttagtaaggagtttgggatatggaattatgttgtgtatttagatatacggggataatagggggatgaaaggtggtttttaaaatttatatttattttagagtttatgaatatggtttatttggaaaaagggtttttgtagacgttatgaagttaaggattttgagatgggattattttgggttatttagtgggttttaaattcgagaaagattgttcgtatgagagatagatagggggagatttagggtatagaaggaggtttcgtgataacggaggtagaggtcgagtggtgtggttacgagttaaggaacgttaagggtttcgggagtcgttagaagttgttagaggcgagaagtaggttttttttcggagttttcggaaagaattaggtttgttgatgtcgtgatttcggatttttggtttttagaacggcgagagaagaaatgtttggtgttttgagttatttagtttgtggtatttggtgatggtagttttaggaaattattatagggattagagtttttacggggttgggtaggaagcgggtgtagagcgcgttaggttaggttttttatttcggagatggaaaagtagagttggagaggttgagatcggataggtatcgagcgtttaggggtaagaatttttaggggatggtagaggttatcggggatagtatagcgagggataggagggaggggtgagggttgaggtatcgttttttaggaggtttcggtttttcgtttattgatgatttaggaatttcgtaagaggagttgggttttattttgtgtcgtattgtattagatggattttggtggggatagacgtttagcgatagcgtggttaagttttttttaggatttcgggtttgtatttatgattatgtatagacggttattttttttgtttgtagttttttttcgtggtttgtttttagttttttagtttaatagagttttttagtggaaagttttttttttggagattttttttttgttgaaatataagtttttggaataagataaaattgtttaatttgtaaaagttataaagtcgttttagaataaaaaaaaagtttcgatttttggttggaaggagtggttttttatgttttagcggttagttattattttatgatttatgtcggttttgttgataaattttttagtatttttttaggggaaggttatagtttttagggagggcgggagagtatttaggttttcgtttataaattagatcggagttagatattgtcgagggagggataagagggtaggttttggggtttttaagttttttttggggttggtagattatcgtggatttattagggtaggattatttttttttataaattttttttgggtagttgtagggtagtttgagttggatacgttttatacgttagtttagtggggtatgaggtatttatagttacgtttggaagttagcgggtcggtatttgtcgggtaggtttttgttatataggtatagcgttttttttatggtttttttttaggttagagtatgtttggggattagagtagttttcgtagtggtttgtagtttgataacgcggcgtgagttatgttttgtagagaagaagagttttttagtgagggaagaggcgtttataaaatttaggatacgcgtagaaattcgtaggaggtgggggcgttgtttaggggtcgtgtcgtttttattttttattttgtagatgacggaattgcggtttagagttgttaagtggtttgtttaaggttatttagtagggataggaaggaagttatttttttagggattgtgcgggagtttagtgataattaaagattagcgttaaagtttgtttaggacgagaattttattaagggaaatagtttcgggattgtcgtgtttattcggaaggtagttagtttataattgagtttttaaaaatgtacgtttttttatatgaaaatatattcgaatgggattttgtagaaagtattttttattaaggtatagttcgaggggaggttttcgttttatttttggttgtgttgtttttagttaagggtagtagggattagagtggtttttggggtatagtattggttgtttttaaagagtgttttgtttagtttatgaaaagttcgtgttttgtgagtttgggagggtgttattatttttagttttttagggagtattatttttaaatttacgtttttttgtttagtttttagattttttgttggttatttatttgggtttcggttagattatttataaagtgaaggtcgaattcgaggtttttcgaggtttttgttagttaggcgggtggagtgacgtttttttggggttggtggtttaggaggtaggggatttattgtggtttgtttaggttgtttggtggggtggttatttcgaggacggttttattgtgtaagtttgacgaaggttttttttagcgttttttgttttgcggtttttgttgggcggagagtaggacgttgggttttatatttattcgttttagcgggtttgagttttcgagtttaaatagataagatgtagttttattgttatttaagttttttgtcgttttttttggtttttttttgaggttcgtttgttgtgttcgattgggtgtgtttagcggtataatatatattcgttttattagttttaacgtgataattaagatgtggttttgaggtcgggcgtcgtggtttacgtttgtaattttagtattttgggaggttgaggcgggcggattacgagattaggagatcgagattattttggttgatacggtgaaattttatttttattaaaaatataaaaaaatatggcgggcgtttatagttttagttgtttgggaggttgaggtaggagaatggtatgaattagggaggcggagtttgtagtgagttgagatcgcgttattgtattttagtttgggtaatagagttagatttcgttttaaagaaaaaaaaaaaaaaagatgtggttttgggagtagtggtggaggggattatacgttttagagaggagttatcgagatgggttttttttttttaggttttttagggattttttaatatatatatagtggtaattaatagattagggtttaaggtacgtaggggttgatatttttagcgatttttcgttttatggttcgtaggttattttagaatatttaaagtttggagtttggtttagttattttatgttttttagcgttgggtttagagggcggtatgagcggtagaaattgttattattgttaattatcgatgacggcgttggttacgtgagatggtagttacggtatcgtatgtgagtgaagggattaaggaggttgggtttgggagggagggtttggaaagttggggtgaattaaaggtaggggagttttttttttttttatttgtttgtttacgttttgatgggtttgtgtttgcggtaagggggttgttagcgtgaatggatatacgtatatatatgtatatatacgtgtatatatacgttaggtttttttgagcgtcgggagtttttttttttataattaattgttaggaaggtatagaaatgttattttaggtaggagatcgaggtagttttgaagatagattttggttggaagtaaaaaataaattatatagtggataaattaattattagttaggtttaagcgtcgtcgttttagattcgagttaggggggtaggttttttatatttttttaaggtttcggcgttaatagttttagtattgatagtggttatgatatgtaagaatggtatattggaaaatgaaagggaagtagttaggagagaggagagtcgagtttaaataaaagttagatttaggagagtttagtttttgagacggagtttattttacgagtttggaatcgttaaaaagaaaagaaatatttttgtgaaaaatgagtaaaagcgttttttgtatgtttatttttttaggtataaataaagtttcgagtttagggtagtggggggcggtcgatggggagggggttgtttgcgtatttgagattcggtttttttttatttttacggatatatttagtagcggcgggagtttcggcgtttcgtttagaggcggtttttttttttttattttcgtcgtttttttttttttagttttttttttttttttttttttttttaaaaatattttttgtttggtttaatttttttaatttgttgtaattacgaatgtattcgaattattatatttttatgtgttgattatatgtttgtgttttaaattgaagtagtattgtttttttaaaacgggaggaaaaagggagtaaaggagagaaatttaaaaataggaggtaggagagagggttcgaagtgggtttcgaggagttcggtagattatcgggtttgtttgcgagagttttagagtttcggtcgttcggtttggtcggtggttgtagaggtttcgagtgcggttttcggtagttttttttttttattttttttagttttcgtcgtttcgaggtttgttgtttttttttaatatttatttggagatgtttaatttagatttttggaaattaatttatagagttaaatttttgacgatttttaaagttttttattttttttgtttcgcgatgttacgatttttttgggtttaagggtttaaaaagtttagtttttgcgtgtttgtttcgtttttttttgttttgggttggttttagtttttttttattttgtattttaacgtggttgggtaggaggaacggtcgtgttttaggttagcgtgttgagaaaaggtttcggagtatttgtttaggaggaattttgagaagttattttttttcgttttattagtttgtagtgatagaggtagttgtcgttttcgtttaggtagagagggcgaacgggacggggattttttggaagatttttattatatacgtatgagttagtgagtttttagtcgttttttgggagggagcgagttttttttttcgggaattcggggttttattgggggattagtgttgttttttattgtttattcggggtttttagaggttgtttatttatttggggggtttttattagtatatggttagggtttatgttgaggttaagggtttagtagagtaggtgggggtttataatgtgggtttttggggtgggaattaggggtattttttttgtttttaagttttattttaagggtttatttaaattcgagatacggaggttggttttgttggtttaagtttgtttaaagagaatgtgtgtttgtgttaaggttgagaatttaggtaatttttttgaaaattttagattgttagtttttgttgagaaagggaggacgcgtggtcgtattacggaagtttttttgtttggtcgtatagggttggtataagatagttttgttttttagataaaatattttttagtttgtgttgttttttaaggtttttaataaatttataatatttgtatttttttatttcgatatatttcgtaggtttttgagtttataatttttgttttatagagttaggtgagttatttgtgattaggtgaggtttatgtatagttttcggttagatgatagagttaaaggttttgaagtgttattttaggttatagtttcgttcgttttttgtttgggataggattttaaatgtaatttttttggtagaaaggatatttttttggggggtggggaggattatttttagttttttgggagatattaagtaattatttttttttaaagagtttggaggatagttttataggtagttagatagtgagggaggtggggatagtattttagtcgaggtgggaggttggggaggaagggagggattatagttacgagagaaggttgaataatggttttagggatagtatgttttaatttttagatttgtaaatgggattttgtttggaataagagtttttgtatttgtgatttagttgtagattttgttgtggcgagagtattttggatggtttaggtggtttttaaaggtagtttcggtgtttatataagacgggggtagagggagatttgatatagatagggatggttaagtggagatggggttcggagagatttgtagatgttggtgttgaaggtaagggttatgtagttataagttaagggatatttatagttattagaggtttaaaggggtaggcgatgaaggtagtggtttttaatttttttggtatttgggatcggttttagggaagataatttttttatagattagggagtggggagatggttttgagatgatttaagtgtattatatttattattttattttattttattttattgagatagagtttcgttttgttatttaggttggagtatagtggtattattttagtttattgtaattttcgttatttgggtttaagtaatttttttgttttagttttttaagaagttgggattatagacgtttgttatcgtgttcggttaatttttgtatttttagtagaaacggggttttattatattggttaggttgattttgaatttttgatttcgtgattcgttagttttggttttttaaagtgttgggattataggtataagttattgtgtttggtttttattttttattttttgagatagagttttattttgggattataggtgtgagttattgtattcggttataagtacgttgtattgattgtgtattttatttttattattattataatatataatgagataattatataatttattataatgtagaattagttggagttttgagtttatttttttgtaattagacggttttatttggtggtgatgggagacggtgatagattattaggtattagatttttataagaagtacgtaatttagattttttatatgtgtcgtttataatacggtttatttttttataagaatttaatgttatggttgattagataggaggtagagtttgggtagtaatgcgagtaatggggagtgattgtaaatatagatgaagtttcgttcgtttgttagttatttattttttgttgtgtaggttagtttttaataggatatacggggttgggaatttttgttttagagtttttagagggttatgtttagtggatattttgattttagtttggtgattttgatttcggatgtgtggtttgtagagttgtgagaggatggttgggcgttgttgtgatttagttagtttgtggttattcgttatagtagttgtaggaaattgatgtagcgttatagacggagttagggtttagtttattggagttgttttttgttattttatttttttttaaaatattgtgttaagttaattattaataattattgatttcgatgggtaggaatcgtagaggttttttggtttgtttttttaattttttttttaattttgaaataatattttttgttggtttttttgattataaatgtaatatttttttttgtattgagtttagaaataagagaaaaagtaaaaagtagaaattttagttgggtaaggtggtacgtgtttgtaattttagtattttgggaggttgcggcggaaggattgtttgaagttaggagttcgaggttgttgtgagttataattgtattattgtattttggttgggtaaaaagagtgagattttgttttaaattaaaaaaaaaaaaaaagaagaggaagaaaatttattaattttattcgagattttttatacgaatttttgttgtggggtagggaagtttaggaaggttttacgaggttttgatttagtttggttggcggtgggaatttgggaatagtttcgagtgaggggtcgggttatgattgagtttatttatttagttattttttgtacgttgtgtatattatgggtttgacggttagggttggagtatttgttgagtatagttttgatttttagttttatttagtatggtttggtttgaggtttatttttttttcgtgtttgaaaatttaaatattttggtttaggcgggggattatttgaaatggaaaatttggtagtatcgattggttttgaagaggtaggagttagttatgagtcggttgggaggcgagtgtagaggtggtgaggtaaggttagtagagggtgggggaggcgagggttaattttttatcgcgtatggtgtaagtattaagggggtattttattaggttagtgtagatttaggtttttgcggtggatttttcgcggtttttttttttagaggaatattgaagaggtttttgtggttttgttttagatttagaggtatatttgtatattaaacgtattgagtaattttatagtgagggagtcgggtttggtttaatttatttttttttaaattggattaaaggttgttgttttaggaaggtagggtttttaggtttacggttttgggaaattttggttgtgttagtttatgagtttagtttttagttattttagtttgtttatattttggagtgggtattgttatttaaaagttttttttagatagtttttagggcggtatttttgttttttattttttatagatttttggttatttttttgcgatattagtattattggtttatagttttttttaattgtaaagtggggtttagcggtataggttgggtttggtagggcgggaaggaagagcgaaggttattttgtttttaatagtattggtcgggttttggaaaggtcggaatttatagataggaaggaagtgttatatttatttaatttgttttgcgttagttagggggtattttgtagaaagaagttaggtggtcgtggtcgggtgtagtggtttatgtttgtaattttagtattttgggaggtcgaggtaggtggattataaggttaggggttttagattagtttgattaatatggtgaaatttcgtttttattaaaaatataaaaattagttgggtatggtggcgtatgtttgtaattttagttatttagaaggttgaggtaggagaattgtttgaatttgggaggtggaggttgtagtgagtttagattacgttattgtattttagtttgggcgatagcgcgagattttattttaaaaaaaaaaaaaagaagttaggtggttattttttagtttttggtttggtttaggaattgttttttttttaagatgttattaaatgttttttttattaggaagttttttttggttgttttttttatttttgtttttgttttagaatacggttcggtttttacggataattttgatattagagtttaatagagatttttttttttatggaaatttatattttaaattgaatatgtgtgtaggataagtttttgtttttatgtgaaataaaagtgaaaggtgcggattatttgtttttttttatttttttttataataatttgggttttataggggtttagtaggagttaggtttagtttagtcgttttaggtgtattattttgggtattagcgtttttgtttttttttacgaagtatagttttattttttggtatttagtggggaggggatatatattaggtattttttagggtggattgtgttttttatattaggttaggaggttttggggttggtttagttatttagaaaagggagtaggcggtttaggtgatattgatgtgggtagtaggggttttcgggaaagggttttcgtaggatcggttttattttgttttaggagtatatattggggaagggtgttgcgcggaggtggagagaacgtatttttggttgaaagtatgttttttgatgttttgggttcggatttgttgttattttttatgtttttttatttaatatacgttttagtaaattttttatgttgatgagcgttaagttatagaggacgtataatttttcgttttaaaaagtgattttttttgttgggtgtggtggtttatatttgtaattttaatattttgggaggttaaagtgggaggattatttgaggttaagagtttaagattagtttgggtaatatagagaaattttatttttataaaaaaaaaaaaaaaaaaaaaaagtttaggtatagtggtttatgtttgtaattttagttatttgggaggttgaggtaggagaattatttgaatttgggaggtagagattgtagtgagttaagattatgttattgtattttagtttgggtaatagagtaagattttattttaaaaaaaaaaaaaatttttttttttgaaatagggttttattttttttgtttaggttggaggatagtgacgtgattataatttattgtagttttagtttttcgggtagttggaattatagggttgtattattacgtttagttaattttttgtatttttagttaagacggggtttcgttatgttgtttaggttggtttggagtatttgagtttaagtgatttttttatttcggttttaaaagtattgggattataggtatgggttattatgtttagtttgaaaatattttttttaagaattagttagttatggtggcgtataattgtagttttagttatttaggaggttaaggtaggaggattttttgagtttggtaggttgaggttgtagtgagttataattgtgttattgtattttagtttgggggatagagaaagattttgtttagaaagaaaaaagaaaaaaaaaagatttttttatttattttttgtttatttttagatttaattattgaagtttgtttttttgaattaaaaatgaaggagtttcgttttggatttttttttgttgattttgttattgtatttgttagtagagttagttaagattttttaggttggttttagtttggttcgtttatagttttttaagtaagacggatttttaggttgaggttagttgtatttttttttggaatttttttttattttttattgtgttttagattttggttgtttttaaataaatataatttagttatttttgtttttggggtcgttgtagggtttattggtgtaaatcgtttgggtaggtttgttgttttaggagtttttttaggttagcgtggaaggaaattaagataacggggagaagtagttcggttgggtttaattttatttttatatgttcgtgtttagttaattatttgggttgtagtttgataggagttggagttggcgttttatttttagagggggttttcgattgtttttgtagagcgagggaggtttgggggtgtagaggttaagggtttttgtagagtttgttttaggttttttgagtttaagtttttttgtagttaacggaagattttttcgagagcgggtgttttttattttgtttgtttagtaggtgtttagtaatcgtttattggataaataatgaatttgtggatttaacgtgaagatgatttaaattagcgtttttttatagaatttttcgtaatgatgttaatgttttgtatttgtcgtagttaatatggtagttatatgtggtagtgaacgtttgtaatgtggaagggttattaaggtaaagagtttcgtatttatgttataatttaaatttaaatagttataaatgtttagcgtgtgtttcgttatatagattttttttgttattttttttttttttttagagatattgtattcgttattaattttttattcgggaggtaaacggagaaatgttattttttagttaacgtaaaagaaggttaatatttgtattttaagttagttttttgggtaatttttttaagtattttttattaaggttagtttagtaatattttttgattgtttgttacgtattaggaaagtatttcgtcgtggttttggttcgaggttatggaggatatagaaataattaaggttaagttgatagaaggggtgtgataagatggtttaaagttattgagttagttaggaggtttaggagtatggaagttttgttttttagaggataagtggtaatttatttagggggggttcgagtatttagagttaggagcgtagaagtagggggttttaggttggaaagcggtattagggttaggttgggcggtagtacgaatttattttcgaggttttgggggcggaaattaagggttttatgagtaagaagattcggtttaggtttaatggaaatgatcgggtggagggattttattattcggtttttagtatatagggagggaagtggtaatcgttttttaaatgttggtcgtggaggggaaggagttatagtagggtaggggtggggaggatggtatttgttggtttaaggagggatgatggaggtttaattaagatatgatcgtgatcggggtagtttgtttaagggttagtatgtagagggcgagttgatgagattttggtagtttgttgagatttgggggtgttggggaggtagaggttaaggttaattttgagattttttgtttgtaaatttgggtgggtggtaaggttgatattagagaaatagaggaagagtgggtagttatgggtgagagaggaagtaatgaattaggggtgtttgtaagagtttaggggtaaggttttcgggtagttaagatgttggtggttttttttacgattagttttttttacgtggtatatttttgtttgtatggttgggtatggggtatttgttcgttcgatatattttgagtagttattttgtgtattgaggtaacgtggtacggtgttttggggaaatagcgaggaggtattgtataggttttatttttttggtattttttgttttttggggatggtggtagttaaataagtgatagttaattgttaggagagtttggttttgatttattaggtggagttaggtatttttgtcggaagaggtatgggaattagtataggatgaagggaggtagcgagtattagtttaggttttgtttttatagggttttttttttatatttatttgtgtaggcgttttttgtgagggtagagatatttgtagtgtttgagggagattttttgcgggcggggtcgtttatttatagcggttaggtgggaggtgtattagtgttttgtggttgttataatggattatagttgtggggtttgaaaaaatggaagcgggtttttttttatgttggaggttagaggtttaaaattaaggtgttagtaaggttatattttttagggaggttttggggtggggtggggggggggtttttttttgtttttttttagacgttttttggtttggggttgcgttattttattatttgtttttgtttttacgtggtttttttcggtgtgtttgtggtttttttgttttttttaaggatattagttgttggatttagggtttattttaatttagaatgattttattttaagatttttaattatttatatttgtaaagattttatttttaatttttaggttatattttgaggtttttggtggatatgagtttgtgggggatacggtttaatttaggatagaagggatgatgggggtattggggaaaaggttatatattttagaggtattggaagatggaagagtaggatttagcgatacgggatgttaggtagaggagttggttttaaggattttagtcggggtttgagggttagagggagggaagtttaggtattattgagatgaaatgtttcgtgtatcgtgggaaatagggtaaaagttcgttggacgtttagttagagaggcggttgtttgaggtatagaaaatgagcgaatatgggagagtttattagaaggttattcgggagggcgtggtggtaatatttagaagggttgagaagcgtatttttatagtttagttaaatttatttggggaaatatacgttttcggtagtattagtaatagagaagattttcggcgatgttattagtgggttacgggacgggtaaattttgtttttttatatagaggaatattcgttagttgttaaaataagtgaattaaggtttcgtggatttatacggataagtttttacgtcgttacgttgtgggtataggtagggtagttattgattttagtgaggtattaaggatgtgatgttgatgacggtatttaagaggagatagatttaggttgtttagttatacgatgttgatgatcgtatgtaagaggagattaggtcggatgcggtggtttatatttataattttagtattttgggaggttaaggtaggtggattatttgaggttaggggtatgagattagtttgattaatatggtgaaattttgtgtttattaaaaatataaaaaaaattagttagatatggtggcgggtgtttgtaattttggttattgaggaggttgaggtagaagaatcgtttgaatttaggaggtagaggttgtagtgagtcgagatggtgttattgtattttagtttgggcgatagagcgagattttattttaaaaaaaaaaaaaaggagatttaggttttttagatatattattgtttagtatagatgtgtttgttcggggttagattttaatttagaggggcgggtatcgtagtaggagtggggttaggatggagaaggttatttagggttgcggttatatttgtaatgttttattttttaagcgggatggtgagtatataggtgttttattattttattttttatatttttgttttgtagttttaagaattttattttttttttaaaaggaaagaaagtgtgtgagttgattaaagcgttgattatggtgttatttaagtttttgttagaaatgttatttttggtttagttttaaatataatttcgagaagagttttcgtttttttggggagggtaagagttttagatataggagattggttagatgtggatttatagagaagttgggttgggaggatgggatggtagatagtcgtttggggagtgttaaatggggaggtcggagatgttggggcgtttaggaatgaatttttgtttggattagggttttagtaaaagggaggtagggagaaagaaagaagttaagaagatgaggaaagggtgtttcgggttagagtttatagaggtttatagagggaggatttcgtgtgttagtaggtagttttacgtaaatttagattattagtttgtagttttgggatttagtaaattatgttttaggtttttaagttgagttgtgatcgtggttgttaagtgttgatagtatagaattagttagtttgagtagagggaagtaatcgtcgggggaggttgtgtttatgtagtttagggtgttaggtttttaagatgtaatttttataagaattgggggattttttttatttattttattagaagttggttaatgagagggaaggagatggagaggtagattagatgcggagtcggagaaaagttttttagaaatatagtagcggttgggttgtttagtggttagtgtttaatatgattgcgatgggcggagttttttttaattatagcgttgaattatgtagttgtttaggggtttttagttagagtattatttttttttttttatatatagttttattttgtattgtaaggggttttatatgtatttaatgtggatacggtattttttttatttttattttttgtaaaaagttattttttttattgtttaggtttggtggtgtatagtttacgggtattgtatttatttttggaaggtagatttaggaggcgtttgtgttgtttttatagaagtaagtttaggattagaagtaggttttgggtttagaattttgaggttttaggtgttagtgtggtttggaattgtttagttttatagttattagttatacgtagatataagtggaaatttatttaaaataaataaataattttatgtaagtaaatgagtgaataaagtaaacgtaaatatttatattttgagtgtgtaatagatttaggcggttaagcggttattatataggatggcggagtgtagatgtatagaatagatttattattatagaaggttttattagacggagttggtttagagtatggaggtggcggttttagatgggtatatgtttttgttttcgtaggcgttttgttttggtaggacggttgttttattttgttttgaaggtagttttggtttataggcgttttatttgtgtggatttgatttcgggttcgtgttttttggtaattttgttttttttagaatggttaatttatgaaggtatagtttttgtttgtttgttattatgatggtagttaggggtttggtatttagttggtttttagtatatatgtataggtgattacgttatttttgttttttttagagtttttcgttttttaggggaggtaagtttatttattgttgtgatttattattttttttaaatagaaaagttattagatgggtatttgttttagtttggtcgttggaagtgatagttaagaataacgtaggtttttagaaatagaggtattagtatggttatattggggttaggtaggggagattagggatatttagtggggagaagatgacgcgtagatttagttttggggggtaagggttggaggtagagttttgatttttttgttttatttttttgtttaggttgtatttagtgttggtagagtttttttaagtttataagttgtaattcgtgttttggacggttagttttagagttttgatgggtgtatttgttttttttttttattggttagtgtggaaaatttttaaatatatggaaaaagtataaggagtagtatagtgattattgttagaggtttatttatttttttttagataatatcggacgtatttgttttattttggagtattttttattttgtaaggttgtagggagtttatagatattgaattaatatcgagaggtttacggttaaagttatttgtttatggtatatttgtttttttagtattttaaattaaattatttagttttatttattttttgtttttttttttgtttcgtatatacgggtttgttttttgagtttgggggtggttgtttttgtttttataaggattatttttagtagggtagcgtcgataggtttggaagttatttgagtttaaagtcgttaaagattgcgtttttttgggaaatgggtaagtggttttatttatttagggaagttaggtggggaggtaggttttagattagaatgaagggattttagtataaatatatttatgagttgggtggggttagagcggagcgagttatttatttgggttattggagttattaagttttcggagtcggttattggaggttcgcgtgttttttaaagatagagataaagggtaaaggttatataaggttattggcgtttttttttcgggtggatgattaatattaggaatgttttcgtttttgtttttgttgtgagttttagagttagaaacggggtttatttggggatagaggttttatttttttaggtaattttggacgttggagggatgatagttattgttgtttggttgttggaggggttttgggttaaatttttatatatatttttttttaagttttattatttttgttttgtagataaggaatttgagtttttatagagtgttatttttttgtggttatatagtgaatgagagttgtatataggtgagtttacgtttattagattttaagttgggttgtatttaagcgtgtttttgttggacggagtttttttttttttttatgtttattcgttttatgaattagggtttttttatattagggtttataatttacgggtagttttgatttagttttttttatttttagggttgggtgtagtcgggttggatttggggatggagtgggataggttatttttattttttgttttaggagggaataaaaatagaattttagattaatgtagtttttcgcggtatgcgttttttttgtttatatataggttttggtttggggttgtttgttggagaggtttatggtaggtaagttttaattcgaggagatttgttgaggtgttaagttaagtaaattcgaaaggttgttaggaggagcggttttgggagtataggcggttattttattgttgtagagtacggtattttggggatgttttttgggtaatgttatatagttattttttagagagttttagggatatataattagtttagttttattaatagtgagataagggattaggtagatttagatatttttttgtatttgattattatgttggttgttggttaaagatgttagtttttttttggaattttttagaaaggtttttgtagtatttatttatttatttatttatttatttattttatttatttatttatttatttatttatttatggattttatttattttattatttttttatatatttatttatttatttatttaatttatttatttagttttttatttatttatttatttattaatttatttatttgtttatttaatttatttatttattaatttatttatttattatttatttatttatttatttatttatttatttttttatttatttatttatttttttttttatttattttataattttatttttaaattgtgattagatggaaatgggtgtagttagtttgtttttaaaggtttagagcggaggtagagtgaattgtttatttggttttcgtgtttagtagtttaggtttgtatatatgttttataattataggatattagatttagtaattggtagtagaatgagtatagtgtatttttcgcggaattagtattgatagggtatttatttttattaagtttgagtttttttggtgttggagggaatttttagatgggttttaattttagttgaatttattttttagggaaagtaatatcgtgagaaatgcgtgtgatataaggttttaaagagggtgtgggtcgtgatttttggagtaattagggaggttttatggaggagatgaggataaagttgagttttgaaggagggatcggaggacgttgagtagggatatttatttttgtttgcgagggtttgacggtaggttgtgagttgtattttagtttcgatttatttaatttataattttagtaggtaggtgttttcgttttattttatagaggaggaagcgaggtttagggttgggtaaattgtttaaggtcgtatagttgcggaatttatttttagtatttttagtttgttttagttatgttcgtgattttatttagtattttttttttggtgtttatttattttgtttattgttaagtaataaaaattttattaggaaaatttaggggtttttggttagtttttttagatagaaaggtagatttcggcgtagatttttaggaagtaaggatggaagggttagtatttgttttttagaaatgatagtttttttaagattaggagagatggtttagagtgtagtttcggtgggttgtttaggattaggaggggagaggagcggggaggaggatgaattttatttttaaggttgttgagtggtatatagtgagtttggattttttagttttagttgagtttatttttacgatggttatgagtattttttttatatattcgattggaagtcgtattgtatataacgtatacggggttattattttttgttttatatatttttacgtatatattattagtgtattattgggatattttgttgttcggggttgagagtgaattagaattttgtttataaatttagtatattttattgtggaaataatggggggtaaggaggggtcgtttagtaaagaataggatatacgtttttgaggatggagttatttttggttgagatatttttgtaggggatgtcggcgataaaggttgttttatttttttttttgggttagatggatattatttttgttttttgttttttagtattaggtaaaaggaaaatagaagaggttttatttaggttaaatattttagggttttttattcgtaggaaatatgttggtttattttttttaaatttagtatgggggtggagaaacggtggggaaaatagtatttgttttagattttttgggtggagtttttgttttatttatattgtttatttttttgattttttaaaatgggtatttggtgtttggtagtttttggtatagagaagacgtaaagtaaatcgtttataagaagggggcgagcgtagtttgagtattttttgtttttgaataaattgttaggtttagcgtagtcgttgtcgttattgttgtttttaggaagggatttttggttacgagcggttttagtttagttttttggatttaattatttaggtttgtgtttgagtttagtaaagaggtagttagaaaagtttttaagatatttaacgatttcgtggttttagttgagaagtgagttatttttatgtgattttaaaataaaatatatttagaaggagagaagataattgaaatttagttgtttggagttattttagatgaaagtatttgagtttttgggaggtaaaggaggtaggaaagtttggagttagatgattagaatttgaacgtagatttcgttaggtttttgttgtgggttttgggagatgatttttattttttgagttttagtttttttggggatagagatggtgtttatttataggttgtttcgagttaatgaggttatatggcgtaagtattagtatagtgtttggtataaaattaaaatttaataagtgatattattattattattattattattattatttttgagatggagttttgttttgttatttaggttggattgtagtggtacgattttagtttatcgtaattttcgttttttaagtagttgagattataggtatttgttattacgtttcggttaatttttgtatattcggtagagatagggttttattacgttggttaggttggtttcgaattgattttaggtgatttgtttgttttagttttttaaagtgttcggattataggcgttagttatcgttatttggttgtgatattattataatattaatattataatagttggttaggtatggtgatttacgtttgtaattttagtaatttgggaggttgacgtgggttagttattcgaggttagttcgagattagtttgattaatatagggaaattttatttttattaaaaatataaaaattagtcgggcgtggtggtattcgtttgtaattttagttattcgggaggttaaggtaggagaatcgtttgaatttaggagacggaggttgtagtgagtcgagattatattattgtattttagtttgggcgatagagtaagattttgttttaaaaaataataataataaataaataaaatatattttgacgagatatggtaaaagatagtagaaggtaggagttcggggatttattatgggtcggcgttttaagtagaaagaaatgtagtgtttataagttagagagtagatgtcgaagataggagacgagcggggttttttggttttggagaggaaagggtgagtttaggtagaaagagtaaatttagggcgttttgtgtagtgttttttttgtggaattagtttagggtattagtagtatagtttttttttagtagtggagattaggttaattgtttagtgttttttttgtttttttgttttaattttattaagtatagtttttttttgggtatagtagttttgtaggggtggatattgatttatgtatttaggagtttagaggtttttttttttttatttatttatttagagatggagtttttttttgtcgtttaggttggagtgtagtggtattaatttggtttattgtaatttttattttttaggtttaagtgatttttttgttttaattttttgcgtagttgggattataagtatgtattattacgttcggttaatttttgtatttttagtagagatggggttttattatgttggttaggttggtttcgaatttttgattttgtgatttttttattttggttttttaaagtgttgggattatagacgtgagttattacgttcggttaggggttttttttaatggattttttttaatgtatataatttggggaatttagatataagaaagatatagagtatgaaggttttttattggtttgtttatttttagaggtggggttttaggtggtttaggttggttttaaatttttggttttaagtaatttttttgttttggttttacgttgggattataggtataagttattacgtttagttatttttttttttatttgggttgttatgttagaatttggtaagttataagatggaaatgtttaaataggtatttagaatttgagtagatattatttgatgtattattgttgttattttaatgattgaaatgtatttattatattcgtttttttaaaggttattttagatttttatagattttatttgtgatgtaagatagttattttaaatttttttgtgggttcgaatagattagatttttgaatttttgggtagagtagggatggggttgttttagaggagggtgatatcgttatatttttgttttgtttttgtgttgataatgaatgaggtttggatagttttttttttattaaaagttatatttttttaaaaaggagttttttaggatgaggcgttatgataatttaattgtgtataaatatttatttttaataatgatagaagttatttatagaaaagaatttatttttggtcgggtacggtggtttaggtttgtaattttagtattttgagaggttaaggtaggtaaattatttgaggttcggagttcgagattagtttgattaatatggtgaaatttcgtttttaatgaaaatataaaattagtttgtatgtttgtaattttagttatttaggaagttgaggtagaagaagtatttgagttcgagaggcggaggttgtagtgagtcgagatcgtgttattgtattttagtttgggtgatagagcgaaatttttttttaaaatatatatatatatatatatatatatatatatatatatatatataaatttatttttatttttttttttgaaatttttgagagaggttaggtgtagtggtttatatttgtaattttagtagtttgggaggttgaggtgggaggatggtttgaggttaggagttggagattagtttgggtaatatagtaagattttatttttattaaaaaataataaaagtttaaaaagtttttgagatagtttttggggaaaggtgggttatggagatttttattttggttattcgtgtttttttcgtttgtttttttgtggtttttttttattttgagtttggggtgggggcggtttgagtttaggatgggggtggtttgagtttggggtgggagcggtttgagtttgggatagggcggtttgagttggggtgggggcgttttaagtttgggttgcgggtattttgagtttggggtggggatgttttgagtttggggtgggggtgttttgagtttgggttgagggtggtttgagtttgtgttgggggtggtttgagttgggatgggggcggtttgagttgggatgggggcggtttgagtttggggtgggggcgttttgagtttgggatgggggtattttgagtttgggatgggggcgttttgagttgggatgggggcgttttgagtttgggatgggggcggtttgagttgggatgggggcggtttgagtttggggtgggggcggtttgagtttggggtgggggcgtttaggatgtataggttttattttttttttttgaggtttagtttgtttataggagttgtgaagggttggattaaagttaaaggtttaaattttagatttatttttagatttagtggataattaaaatatttaagtttatttttaaaggaagttgagataaggagataatggttattttttttttttttttttttttgtttttggtttttgttatttggagttgtgttttgaagaggtatattgggtattaggtttttttggttttgtttttattttttgtttagatatagaataatttttttttatttttaaggttgatacgtggggttgtggattaaagttaatttatttatttatgaggggagtaatttttttgttttaggaatttgtttttataggagaataaatattgtagaaggtattgtttttagtggtggtgtacgtttgtaattttagttatttaggaggttgaggtagaagaattgttagaatttaggaggtggaggttgtagtgagttaatattatgttattgtattttaatttgggtgaaaagattaagattttgttttaaaataaaaaaagaatagtattttgtgttaaggttaggggttttagttattttttttgtgaagcggaaggggtattattagtttttgtgagaaggaaatagtttatttaattataaaatgttaattaaaggaggtagtatattggttttggtgcggtgtcgttggtttttgtttggggtaggaggagggttgggggagagttaaaagttaaagaaggtttatggaggtcgttttttttttggtgattagttttttttttgacggtaagttgttaatagtatttggtttttaggttggggaaggtgagattagtttatatttgtttagggttttgttttgtttgtatgggtagtaggcgtttattttgttagatggttttgtttattatagggtattagtgttagttaaggatttatagagtttttttgtaaaggtttattagtgggtattgggattttgggttttatttatatagggtttttatataaaatataggatgtttagttaaatttggattttagataaataattaataattttttgaagagataaggattttgttgttttatttaagttggagtttagtggtatgattatggtttattgtaattttgaatttttggatttaagtaattttttaattgtagttttttaaagtattgggattgtaggtatgagttattaaggttagtaaataatgaattatttttaggtataagtatattttaagtttgttgtgggatatgtttatattaaaaattaatttttgtttatttgaaatttaaattgaatttattgtcgggggagataatggagtgatggattgatagaggagtatagagatagtttttttaaatttttagttgattaaagtttggtttttagtttttttgggtttttagagatgtattaagggtggaagcgattaggagggagataaaaatattgaagtttgagtgttagtattgagtcgtgtggttttggataggattgttttttttttgagttttagttttatatgttataattggttaataatagttataaagtattcgaagttaatggttgggagtttgttttaggaggtaggtattattaggatgtagagagagtgaggagtttttaaagttagtttaggttaggtatagtagtttatgtttgtaattttagtattttgagaggttgaggcgagagaattatttgagtttagaagtttaaggttgtagtgagttgtaattgtatcgttgtattttaggttgaatgatagagtttttgtttttaaaataaaataaaataaaataaaataaaataataaagttagtttgtgtattggattgtatgttgttttaaagtatttaaagtgagagaggttaggaagtaatgagatgtagaaaggtagggggaggaggtttagaggtattagagaagatagttgatttttatttttatatatttttggggtattttgagttttatttatatatttaggtgagaatttttgtatttgtgaaagtaatttgaggtcgagagaattaataggaaatcgttttattttttatgtagggtttttttataaataaggttgagtcgtagtttattattgtagttgagttttttgtagtagttgcggtggggaaggttttttaggaggtttgagtaatttagaaatatttatagtatattttttagtttttttagaggtttttgttgagatgaaagtgttttggttcgtggttaaagagtttagtatattgggtagttatagtttttattatattgatttggttattaggtttttatgaatttagtgaggggagatgggttttttagggaagtttgttgatttttttatattgttgtaaatgtaaagtttggtgattttattatttttagtaattgtgatgtagtaataataagaatagttatgtttatcgtttattgaaggtatatgatgagttagatattgtgttggtatatgtgatttttggaggtaatatatttttttttaaggaggaaatgattgagttttggagggagggttttttatttggttttaggtttttttttgatttgcgttttttttttttttttcgtttgttttattgtagtttttttggtttttttgttgtttttggaatgtattaagtttgtttttagtttagtttttgtattgttggtttttttttgtttttttaattttaatttagttgttattatttttgtgattttttattatttattttaaagtagttattagttattttttatgtaattattttattttaatttttattatagtttttagttttattttgatagtttttagaattgatgaatttattgattttgtttttttttattgtatgtaaattttaagaaataagagtttttgtttgtttattgttgtgttttagtgtttgttatagtatttggtatgtagtaggtgtttaatgaatatatttttaaaagaatgaacgattggaaggagtttgaaagaacgatggtttgtgttaatagtttatttttaatttttttagacgggatggagattattattatgtaattacgatttttttgagtttgtgtggtggttgacggtaggtgttagtttggttggattaagggatggttggtaacgtatcgtttttgggtgtgtttgtgagggtgtttttggaggagatgggtatgtgagttggtgggttgagtggtaaagatttttttttaatatggatgatattattttattgttagataataaaaaggtagagaaaaggtgaatttttttttttttttggaggtgggatgttttttttttttgtttttggatttagaatttttagttttttagtagttttttaggtttttaaatttttggttttaaattaagagttatattaatagttttttagttttgaggtttgtagatttggattgagttacgatattggtttttttgggtttttagtttgcggacggttttttgtggtatattttggtttttataatggtatgagttaatttttttaataaatttttttttatttatttattatttatttttttaattgtttatttgtttatttatttatttatttattatttattttttatttatttatttattatttatttaattaatgtatttatgtttgtttgtttatcggttatttatatttatttattaattatttatttatttattatttatttgttatttatttagttatttatttatttatttatttattttttttttttttttgagatggagttttattttgtcgtttaggttggagtgtagtggcgtgattttagtttattgtaatttttattttttaggtttaagtgattttcgtgttttagtttttcgagtggttgggattatagatatgtattattacgtttagttaatttttttatttttagtagagatggggttttattttgttagttaggttggttttaaatttttggttttaagtgatttatcggttttagtttattaatgtgttggttattataggtaagagttattgaatttaatttattatttgtttgtttgtttgtttgtttgtttgtgtttatttgtttgtttggttatttattatttatttatttatttgtttgtttgtttgtttgtttgtttgtgtttgtttgtttttatttttttgtttgtttgtttatttagttatttgtttgtttgtttgtttgtgtttgtttgtttttttttttttttgttcgtttgtttgtttatttagttatttatttatttatttattttttattggttgtttttttggagagttttggttgatgtagacggtgttttggtaagtttaggttgttatttagattattgtggagggagtgatttaaataatagatatgtattttttagtttgagaggtttaaagtttcggattaaggtgtcgttagggttagttttcggcgaggtttttttttttggtttgtatttatttttttgttgtgtttttcgttattttttttttgtttataagtgaggggggaggagagatttttggtgtttttttttttttttataaggatattaattttattagattagggttttgttttatgattttatttaattttaattatttttttaaaagttttatttttaattatagttgtattgggagttagggttttaacgtaggaatttaaggggaagggtatagtttggtttataataaatgggaaattatgtttatgattaaattttttagaagatatggtttattagcgtcgttaatgattgtaagtaaaggttagagaggaaaggggttttcgtggggtggggggcggtgggggtagttggtgtcgggaataaggtttttttttttgtttaatagtagggaagtgaggtcggttgtagatgttatttggggtgggaagagaggggagtttttgtttgtatattttgtgtgggttttggtttgattttttttcgtgttttttattttttgtgtttttttttgtgtgggagaaacgtcgatttttgttggtttaggtgtttaggtttttaggtttgttggttttgggttgggtttaattaacgagaggtttgggaggaatttgggaggtggaagtaagggagggcgcgggagttttttattttttttgttttagatagtttttttagtaggagaggtggttttttgtgtagttttagtttttgttagagttttatttttgtttgggtttttagtaggtgattttggtttttggattttggttataggatttttttttttttatttttatttaggggtggtggtggtattttgttgttaatttttaggttatttttataatgttaagaattttttttttatttgtatggtttttttttaaggtattgagaagggttttaattatatgtttatagggttaaatattttttgtaaaatttataaaatggaaaatattttttttataattaattaacgttttcgtttatttttagttttgagtttttgttcgttatatttttttttgtgtgaggtggaaacggaggtttgttgttacgtgggggtttttgttaaggagaagttgaattggaaagatatttagtttggttttggtcgggttatatttatgtagtttttatttatttttatgtatagtttagttattgttcgttatttcggtgtggaaacggattttagtaatattcgttttatttatcgttttaattttatttatcgcgtagaattaaaaattataagatacgaatatattttgcggtgtttggcgtcggaaaaacgtgcgtagtggagagaagtaagatttgaaatgtacgggtttagaagtaaatttgtggaaaattatttttattattagaggtgaagttgtaagtaaaggatttagtttttttaatgtggagttaaaatagaaaagtttttttggttagaaatatatgtataaatgttttatatgtagttagaaattttttttatttttttattttttttttgatgggaattatatttaaaaaaaaagaaaaaaataggatttattagaatttttgtgtattttgaataaaataattgtagtagtattattaattttatgttgatcgttatttttgtatatattttaattattaaaaataaaaataaaatttgattaattaaggagatttattcgttttatttatttatttatttttgagatggagttttattttgttgtttaggttggagtgtaatggtacgattttggtttattgtaatttttgttttttgggtttaagttatttttttgttttagttttttaagtagttgggattataggcgtgcgttattatatttggttaattttttatgtttttggtagagatggggttttattatgttgattaggttggttttaaatttttgattttaagtgattcgtttattttaattttttatagtgttggaattataggcgtgagttattacgtttagtttatgtttttttttgttgttttttttttttttttgagatatggttttatttttttatttaggttggagtgtagtggtatgattacggtttattgtagtttcgattttttgggtttaagtaatttttttattttagttttttaagtaattgggattataggtgtatgttattatgttttgttagtttttgtatttttagtagagacggggtttcgttacgttgttcggatcggttttgaatttttggttttaagtgatttatttgttttggttttttaaagtgttgggattataggtacgagttattgtgtttagtttgattagttttttgttttcgaaatagaaaacgatattataaagttattatattgaagaagtaatgttaaaaatgtgggagaaatagaattttggagatatgattgatagttgattggtatttttttgtatgtagtgatgtttgtgatatttaatagttgtttataatttataatttgttgttatttatttttttattttaaatgaattattgtatttatatttttagagggttgtataagtttatattattttgattttttgttgattgtttttttgttttttgtttggtttttattttttttattatttgtgtaattagtttttcgtttttaagtttttttgttttaaatgtttaagtggattaggtattgtggttttcgtttgtaattttagtattttgggaggtttaggtaggaggattatataaatttaggagtataagattaatttgggtaatatagtaagattttgtttttatatatatataaaaaatataaaaattagtaaggcgtgatggtatatgtttgtagttttagtattttgggaggttgaggtaggaggattgtttgaggttgggagtttaggattagtttgggtaataaagtaagattttgtttttataaaaataaaagaaaaaattaggtaggtatatagtgtgtatttatagttcgagttatttgggaggttgagaagggaggatcgtttgagtttaggagtttaaggttgttatgagttgtgattatattattgtattttagtttgcgtgatagagtgagattttgttttgggaaaaataaataaataaataaataaataaataaataaataaatgtttaagcggtttttattttttggttagattttattatatattttatgaataaatcgtatgtatgagaaaggtgagtagatgaatagggtagggttagggggttaaggggaagattatagattacgtggagcgagattagtggttaaaaattgttaattatagttaggtttggtggtttatgaaggtaattttaacggtcgggtttggtggtttatgttcgtaattttagtattttgggaggtcgacgcgagtttattatttgaggttaagagttcgagattagttcggttaatgtagggaaatttcgtttttattaaaaatattaaaattggttaggtatggtggcgggcgtttgtagttttagttatttgggaggttgaagtaggagaattggttgaattcgggaggcggaggttgtagtgagttgggattttattattgtattttagtttgggcgatagagcgagattttattttaaaaaatttaaaaaaaaaaaaataaaaaattgtagattttaataaggaagagttataggacgatattttaggatgcgggaaaaggttacgttagttttggattttttttgattaatgggtattttagttattaaaggggtagatgcgttttatttaatttttatttagttattagagtataatatagggatgtgttatagatagagatggagattaataggtagaggggtgatggggaggaagattgaggtaagaggaataaaacggggattgtagagggtaggtggtaggagtttgagggttttagaagaaattgttgtataagtaatgagttagtagggtgagtgacggttaggagaggtggtttaagaaaataaagagatattttcgggggtatagatgcgttttgaggggtcgaggaagagatggggaaggggtggttttgtggattttcggtatgattgtcgtggtgaaaaggaattaaagatttcgataaggggatgattttttaaataaggaagttttgggttttcgtagggggattagtagattgagggtaaacggtattttgtttattaaagttttaataaaatgttaaggtaagaatatttgtttggttttgggggtaattttagaaatattagaaaagggatttattatgcgtaatttttttttaattatttggagaaatgtatggttatttaagatagagaaaggtagttaaagtaagtggaggttaggtatagtgatttacgtttgtatttttagcgttttgggaggttgaggtaggaggatcgtttgaggttggaaatttagtattagtttaggtaataataaaataagattttgtcgttataaaaataaaaataaaaattttttgagacggagttttattttttttgtttaggttggagtgtcgtggtacgattttagtttattgtaattttcgttttttagatttaagtaatttttttgttttagttttttgagtagttgggattataggtatgtgttattatgtttagttaattttgtagttttagtagagatagggtttttttatgttggttaggttggtttcgaattttcgatttttttggttttttaaagtgttaggattataggtatgagttatcgcgttcggttgttataaaaattttttaaaaattagttaggtatgttaggcgcggtggtttttatttgtaattttagtattttgggaggttaaggtaggtggattacgaggttaggagtttgagattagtttgattaatatggtgaaatttcgtttttattaaaaatataaaaattagttaggtgtggcggtatatgtttgtaatcgtagttatttaggaggttgaggtaggagaattgttttaatttaggagtcgggggttgtagtgagtcgagattgtattacggtattttagtttgggtaatagagtaagattttgttttaaaaaaaaaaaaaaaaaaaaaattagttaggtatgtagcgtatatttgtagttttagttatttaggaggttgagaagggaggattaattgaaattgggaggtcgagattgggaggttatgattacgttattgtattttaatttgggtaatatagtaagattttgtttaataataataataataaataatgtaagtgggtataagaatttatttatttatttatttatttatttatttatgagatagggttttattttgtcgtttaggttggagtgtattggcgtaatttcggtttattgtaagtttcgtttttcgggtttatgttatttttttgttttagtttttcgagtagttgggattataggcgttcgttattgtatttagttaattttttgtatttttagtagagacggggttttattatggtttcgattttttgattttgtgatttgttcgtttcggttttttaaagtgttgggattataggtgtgagttatcgttttcggttttaagaatttattttattttagtattttggaggttgaggcgagtggattacgaggttagaagattgagattattttggttaatatggtgaaatttcgtttttattaaaaaaatataaaaaattagtcgggcgtgggggcgggtgtttgtagttttagttatgcgggatgttgaggtaggagaatggtgtgaattcgggaggcggagtttgtagtgagcggagatcgcgttattgtattttagtttgggtaatagagcgagattttattttaaaaaaaaaaaaaaaagaatttattttaagatagtaagttttagggttgaagttagtttttatttagttttaggtttaaagttataagtatggttattgtaatatttttatttaggatattattttttaggggtttagatttatattattaaggaggagcgtttatattagtagttggggagagggtggttttttataagatgtaatgtttattttgaagagttattatagtgataattatgaaatttatgtttgagatttaattttaagtgaaaagaatagaatttaatatttattttatggggagtataaaattttgaaaatatacgttttttataattaaattaaattttatgttatgtttttgaggagataagtattgaatggaatatagaagaaatgttatagttaatgattgttgaagttttttttttaattttttgtttatgttgtttggtaataagtaatatagaaaattgataataaaaagtaaaagagaaagaaaagatatagtgtatagtttagattgttttttttaaaaaattaaataataataataaaaagtataggtcgggtgcggtggtttacgtttgtaattttagtattttgggaggttaaggcgggcggattatttgaggtcgggagttcgagattagtttgattaatatggggatatttcgtttgtattaaaaatataaaattagtcgggtatggtgacgtaggtttgtaattttagttatttgggaggttgaggtaagagaatcgtttgaattcgggaggtggaggttgtagtgagttgagatcgcgtttttgtattttagtttgggtaataagagcgaaattttattttaaaaaaaaaaaaaaaaaagtataaatgtaagttgggcgcggtagtttatgtttgtaattttagtattttgggaggtcggggtaggtggattatttgaggttaggagtttgaaattaattcggttaatatggcgaaattttatttttattaaaaatataaaaattagttaggtatggtggcgcgtgtttgtaattttagttatttaggaggttgaggtaggagaattgtttgaatttaggaggtagaggttgtagtgagttaagattgagttattatattttagtttgggtgatagagtgagatttcgttttaaaaattaaattaaattaaattaaataaaataaaaaaaagaagcggtataatataaagtttcggtagttaaagcgttaatttttagttattaggaaggttttgttatttaatgatttatcgttttagttaaggttagttatattttgggtttttgatgttggaggtaatatgatgttaatattggcgagaaatttattattttttttttttcgtttttcggtgtcggtttttgtgtgtatttgtagtttttttattatcggtgtttttatggtgtttacgttatcggtttattttttagtaataattcgatagttcgatatttttgtagattttgtggttatagagttaaagttttttgttattagtgggttttgtagataattttttaaatttttttgggttgagttagttaagtttttaataagttggaagatgataggggttggatgtaatttatttttaattggtttgggttatatggatattattttttttttgggatttgatttgggatggaaataggagttatagtttatgggaaggttgtgaaaggaagtttcggttttagggtgcggattaggttgatttgcggaataaggttttaggggcggtttattcgtttgttttgtttagttttttttggtaattatatttattcggggtttattttaaatttggtaggtaatgttgttgtttttattttagtcgttgttttaatacgtttcgtttggttaggataggtgtttaggtatggtatttagggatattttcggttttcggggtttaatttttggtttttaggtgtagcgttgggaaaagtagagggtttcggttatggcgtaggtttcgttataggttatttaagtagtttgggaggagtcggaaagagagtaatgtatttatttggatagagattgaagttatatttttattgagaaaagatgatatttttgtttggattttttttttgaaattttaggtcggggtggggtaggagttagcgagagagtttagcgttttaaaggggattttttggtttttcgtgttttttaatttagtatttttggggatttatatatttagggtagagtggttatttagggttttttttatttagatataaaggttattgaaggtttcgggttaatatcgttttgaggatgattagcgatttgagtttttgttagagatagtaggtagtttgggtttaagggtcgtttagtgatttgaagttgggattattttatattttttgcgttatttttgttttttgttttggaggtttttaggttgttaatagttatgttttggagaattaggttagattaggttgggaataaagtttagttgttatagagttgtcgagaggttattggtaagtagtgtttaggagtcgttttttttttgttagtaatagtttaatgtttttttttataggggttgtaaatgggtttatgtttagggtggggttagggagataaagtagagagaaattgggttgggagtagagagtgttatgttttattttggagatttaaggttaggttattttgtagagttggtgtttagagtttttagcgtataggagaggaggtaaatagaatttgatatttagtagcgttcggtagacgtttttggaatgaatgattaaatttatatggagagttgaaatgggttaggaattttagggagacgggtagtttatagtttagtagggtcgttttagtagagtaggttaatgttaggttttttggtaaatttttcggggtttaggtataattgttatattaggaaaggggtaggggtgattagtttatcggttacgggggtattttattgtttttatagaagttcggtatttataggtttgggtgatatacgatttttatgtttggtattacgatggttgtttattaagtttttttatttattaggattgattttttttggttagcgattttagattattatgatttggtagttgtcgttaggtttgtttggttaaggattttttcggagattgagttattttatatagtaaagtgagttatggggttatagcgttgtgtgttgtgtataagtttcgagggttttatttagggattggtatttattgatttttataaatttttggtaatcgtttagagttgggatgtttttaaggtaatagttttaataaatagaggcgtaggaatttagcgcgttatttttcgttttattttaaaggtttatatttttaggggtttggagtttttttttggagttttttttattttaaagttagttggatttgtttaggaattgttattattattttttggtcgggtttgtattgatgtgtattgaattttttttattaggtttattttaggtaaattttagagtttacgtaatattgtttgtggataaatattggggcggaaataggggttatttttaggttttagttatatggggttgttagggttgtttgggatggtaggagagtgttagaggagggtagtttaaggattaggtagggggtgggaagtgtttttttttatgggtttttaagtgagatgttttttgtaaatatttatttgggatttttaagtagagggttggtttttatgttatttggatttggattttagattattgtttttaagtggtaattttgggtttttttgtatttgttttggtttgagttggttatatttgtggggggtggttttaggaagaaggtggattgtcgtaaacgtaatgtttcgttgttaggtgtattgttttcggttattagaatttttttgggtaggtcggggagatttgacgggtaagtgtttgcggtttggcgtgagcgggtagggtaggtggtttttgtttgggtatgtttttttatttttgtaatagattagggagagggttggttttaggatttaggtttagttagttgttttataattgaggggtttcggcggaggatataagttagatagagttatagattaatcgtacgaggtggttttttttttttagtttaggttttttgaatgcgttagagtagataagtttggacgtgaggaggtaagaggtagcgagaataggcgcggagacggggttgggggagaagaggaagaaattttgtgtttgtgttttttttacgttcgtttgttatcgggttagttgattggggaagtgttttttgagggtgtaattttttgtttttttcgtaagttagttttcggggcgttgggtgagggtgtagttttgtttattacggcgagttagtatattgaattacggtagaagttgttttttgtgtgggtgtagtttttttttttgtttaggatttagaagttacgatagtatagagttttttaatcgtggttggtgtttttttaggaattttttgaaagttatagagaaattttagagtggttgggtacggtggtttatgtttgtgattttagtattttgggaggttgaggcgggtggattatttgaggttcggagttcgagattagtttggttagtatggtaaaattttatttttattaaaaaatataaaaattagttgggtacggtggtatatgtttgtaattttagttatttaggaggttgaggtatgagaattgtttgaatttgggaggtagaggttgtagtgaatcgagatcgtgttattgtattttagtttgggtaatagagtaagattttattttaaaaaaataaaaaataaaaaaagaatttttagagtaatttttaggtgttagtaggggtgtgacgtaattttagtttcgtttttgtggtttatcggtttcgggtaagtttttttgtcgttgttatttatagagagtttttaggggagtttgggaatgacggtaagttttatgtgatttagtatgtaaagggagttttaaaatttagaatttagagagttagggcgggtatagtgtagttggttttagtgttgaggggttgggggagagattttgtattatgttttgattatagtaagggaagattatggaggtttttggaacgttttagtaatggcgtaattttagttttttttatttttttgttaatgataattatgattatgatagtagttaataggttatagagtaggtattttttagtttttttaaatatgaattcgtttaatttttataataatatagtattgttttatttaataaatgaggtaggttgggcgtggtggtttatgtttgtaattatagtattttgggaggttaaggtaggtagattacgaggttaggagttcgagattagtttgattaatatggtgaaattttatttttagtaaaaatataaaaattagttgggcgtagtggtacgtttttataattttagttatttaggaggttgaggtaggagaattatttgaatttgggaggcggaggttgtagtaagttgagattatgttattgtattttagtttgggagatagagtgagatttcgttttaaaaataaataaataaataaaattaaaaaatattatatatataaaaaaataaatgaggtaaatgagatgtatgaggtgagaattttgtgttatagggagaggcgtagtttggtgagatttaattttaaggggttggcggttttgagtttttaagtgtaattattggattatattgtttgtagattattattatttttattttattggaaggtcgggtgaggtaatcgggaaagtttggagtagtagtggagttgttagagagaatttgtttttagtgtttttttggattttgtagttgttttgtgtgggtttttgttgtttttcgtattggaaaagatttttttatagatggggttttatgacgttatttaggttggagtgtcgtgtttatttttaggcgttgttatagggttgtagttttgaatttttggttttaagcgatttttttgttttagttttttgagtagttttttgggtttaagcgattttcgtgttttagttttttgagtagttttttgggtttaagcgattttcgtgttttagttttttgagtagttgggattttaagcgtatttggttaagtttttttttattttttattatttaagatttttttttttttaaggtttagtttaattttatttttatttaaaattttcggggtatttttgtagtatttggaggttgaattgtttaggagggaagggtgttaatgagttggtgtttcgtttttattttgattttcggtgagaatgtaagttttttgtaggtaaggattatattttattattatttttgtatttatttagatttggttatgtgtgtttagtatataaagtgttttcgatgattgtttatagatttacggtatttgagattgttttaatatatttttttaaaattttttttttttttagaggtttacgaatgtttaaattaggtttatcgggaataatattatggttatttcgtttattttgaagtttatatataggtttggaagtaataatttcgtatagtttagatgaaaaaataaagatttttttgttgtttttggattgttagagttttgggggatttttaatattttttgttgttttttttaattttatggtgtcgatggtttgttggggggttagtttgatttttgcgagtgttcgtattcggaaaagggttggtgttaagatagttttaggatatttagaatgagggtaagaggttatttttattattagttttttttagttttattttatataattgtaatatagtgatttagtatattttgggttattgttaagtagggagtaaattagaaatggtttgagttttttttttttttatttttagaggggtttgtttttttaggtaaatataaggaggtatcgaggttgttgtataagagttggtttttgtttattttataaattttatttttatttattgtaaaaggttttgtttttttttttaaaaaaaaaaaaaaaaaagaaatttagtgaggggtggggtaggtgtgtgtggaggagaggagaaaaggataagtgatggtttttttattttttagtaagtcgtaggtgtagagattttaagtttgttttagggttttttcggtatttgtgtaggagggttttcgtagaaaaaatttaggatttacgatttgggaggatttcggttatttttattgtttggatttattagtgggaggtaaagtgtaagaaattaagggtaaagggttttttttgggcgggttagagattttttggaaagggttatgtatcgcgcgatttttataataattttaagtatttggagtatgttggggaggaagtttcggtgttaaaattaagtatgtgttatttggaagttcgttttcgtttattagtatattaatttatttacgtttttgatagagttgtgtttcgggtgcgtagagggttattttgttcgtaataatcgggtgaaagttgaaattttaagttattgatttagaagggtattttcggggaagttttgagtaattttttttgagataaggtattttattatttattttggtttttaaatatggaaagttagaggaaatcgataatggtttaaaggtagggggatggtttcgatgatttttttatttttaattaaggtttatgattttgtttttttattaataaaaattaatttatggatttttggtaggtatttttttatttgaatgaattaaaggagggatattaaataaacggtttttagatttagaagaggagacgttatttataatttgaggattgaggaggataaaggattttgtttgtttggattttttggagaaaattataaaggaaaaaaaaaaggaaggaaaagataaataatgaagatttggattttttttaatttgtttttgtggtttcggtgtgtttatttgtgaaatggaattttagagtgttagagcgggagttttttatgaaatgaaagtttttgaatcggtttatggtgaggtttaagttaggtttttttcgtttatttaaggcgggttttgttagggtggagtgaggatgttagtcgcgggcggcgttttgagcgtaaaacgtgaattcgagtcgttaagtttgggcgttgttggacggttttatttggaggtcgtttcgtgttttattaagtagaggagaaatcgaagagaattcgaagaaaggatgttgcggtttggattattagttttagaggttgaatttaaggatatttttttatttagtttcgattttatttatttatatagacgtatagggatttaaagtattcggtcgatttggaaagttagcgatttttgcgagggtgtaaggggcgaggaagagggagcgttttttagggtagttttttcgatattcgagtaagggttggagatagcgtaggggacggtcggtttaggtcgaaagcggttcgatagcggttttgttttgggaggaattcgatttgtagtgtgttcgtcgcggggattcgtttagtttcgggggcgtttcgttattttcggtcgtaggtatttaggtgagtagcgttggtttcgggatatcgatttttttttatttcgggcgcgaagtttatttgagtaagatttttttatggtgttttcgtggtcgtcgtttttaggaaagtgtggcggcgaggtagcggggcgcgcgtttttagggcgttaattttgggtcggtagtaggaaggcgggaagagggggcggttcgtcgtttggagtgtatcgatcgggtttcgtttcggtttcgttttcgtttcgttttttttcggagatgcgtatagaatttcggtttagtcggttgtggtttcgtttttgattcgtttttttttcgtttcgtgaacgtgcgcgtcgagttttattttcgtttatttttgcgttgcgttgtatttggcggagcggggttggcgggcgtcgggtttgggagggggcgttttcgcgcggtagcgtagattagattagattaggttaggtcgggggtgggggtcgtttgcgtggttcgtcgcgttcgtagttttgtatttttagtttttcgcgttggcgttaatggttggtttcgggagtcgtcgtattttttagtttcgagttcgggcggggcgggttcggttaggtggaagcgggcggaggtgcgggcgtttcgggcggtttcgtcgggcgaggcggcggcgtcgggtatcgcggcggcgtcgggtatagtcgggggtcggagtcggggtgtcggtttagtgggtcggggtagggcgggataggatatttgttttgttatttttttggtaattaaaagggtagagtgcgtcgattgagttggagttttagtttttttatttgtaaatgggcgcgttggatagatgattatttgttttttttgcgttgggtatcgtgcgtagttcggtgtatcggtgtagcggggtagatatagggagtcgttttttataattcgggtaacg

SEQ ID NO: 6 - DNA, 1405 bp, Artificial Sequence
  chemically treated genomic DNA (Homo sapiens)
cgttattcgagttgtaaagggcggttttttgtgtttgtttcgttgtatcgatatatcgagttgcgtacggtgtttagcgtagggagaataaatgattatttgtttaacgcgtttatttataggtgaggaaattaaggttttaatttaatcgacgtattttgtttttttgattattagaaaagtagtaggataggtgttttgtttcgttttatttcggtttattaagtcggtatttcggtttcgattttcggttgtgttcggcgtcgtcgcggtgttcggcgtcgtcgtttcgttcggcggggtcgttcggagcgttcgtattttcgttcgtttttatttggtcgggttcgtttcgttcggattcgggattgggaagtgcggcgattttcggaattagttattggcgttagcgcggggagttgggggtgtagagttgcgggcgcggcgggttacgtaggcggtttttattttcggtttggtttggtttggtttggtttgcgttgtcgcgcgggggcgtttttttttaggttcggcgttcgttagtttcgtttcgttaggtgtagcgtagcgtaggggtgggcgggggtggggttcggcgcgtacgtttacggggcggggagggggcgggttaggggcgggattatagtcggttgggtcggggttttatgcgtattttcggggaggggcggggcgggggcggggtcggggcggggttcggtcggtgtattttagacggcgggtcgtttttttttttcgtttttttattatcggtttaggattagcgttttgggagcgcgcgtttcgttgtttcgtcgttatatttttttgggagcggcggttacggaggtattatgaagaagttttatttaggtgggtttcgcgttcggggtggggaggggtcggtgtttcgggattagcgttgtttatttgagtgtttgcggtcgggagtggcgaggcgttttcggagttgagcgagttttcgcggcgggtatattgtaggtcgagttttttttaggatagggtcgttgtcgggtcgttttcgatttgagtcgatcgttttttgcgttgtttttagtttttgttcgagtgtcggaggggttgttttgggggacgttttttttttttcgttttttgtattttcgtaggaatcgttgattttttaggtcggtcgggtgttttgggtttttgtgcgtttgtgtgggtgaatggggtcggggttaggtggaggggtgtttttgggtttagtttttagggttggtggtttaggtcgtagtatttttttttcggatttttttcggttttttttttatttagtggggtacgggacggtttttagatgggatcgtttagtagcgtttaaatttggcgattcgggtttacgttttgcgtttaggacgtcgttcgt

SEQ ID NO: 7 - DNA, 1405 bp, Artificial Sequence
  chemically treated genomic DNA (Homo sapiens)
gcgggcggcgttttgagcgtaaaacgtgaattcgagtcgttaagtttgggcgttgttggacggttttatttggaggtcgtttcgtgttttattaagtagaggagaaatcgaagagaattcgaagaaaggatgttgcggtttggattattagttttagaggttgaatttaaggatatttttttatttagtttcgattttatttatttatatagacgtatagggatttaaagtattcggtcgatttggaaagttagcgatttttgcgagggtgtaaggggcgaggaagagggagcgttttttagggtagttttttcgatattcgagtaagggttggagatagcgtaggggacggtcggtttaggtcgaaagcggttcgatagcggttttgttttgggaggaattcgatttgtagtgtgttcgtcgcggggattcgtttagtttcgggggcgtttcgttattttcggtcgtaggtatttaggtgagtagcgttggtttcgggatatcgatttttttttatttcgggcgcgaagtttatttgagtaagatttttttatggtgttttcgtggtcgtcgtttttaggaaagtgtggcggcgaggtagcggggcgcgcgtttttagggcgttaattttgggtcggtagtaggaaggcgggaagagggggcggttcgtcgtttggagtgtatcgatcgggtttcgtttcggtttcgttttcgtttcgttttttttcggagatgcgtatagaatttcggtttagtcggttgtggtttcgtttttgattcgtttttttttcgtttcgtgaacgtgcgcgtcgagttttattttcgtttatttttgcgttgcgttgtatttggcggagcggggttggcgggcgtcgggtttgggagggggcgttttcgcgcggtagcgtagattagattagattaggttaggtcgggggtgggggtcgtttgcgtggttcgtcgcgttcgtagttttgtatttttagtttttcgcgttggcgttaatggttggtttcgggagtcgtcgtattttttagtttcgagttcgggcggggcgggttcggttaggtggaagcgggcggaggtgcgggcgtttcgggcggtttcgtcgggcgaggcggcggcgtcgggtatcgcggcggcgtcgggtatagtcgggggtcggagtcggggtgtcggtttagtgggtcggggtagggcgggataggatatttgttttgttatttttttggtaattaaaagggtagagtgcgtcgattgagttggagttttagtttttttatttgtaaatgggcgcgttggatagatgattatttgttttttttgcgttgggtatcgtgcgtagttcggtgtatcggtgtagcggggtagatatagggagtcgttttttataattcgggtaacg

SEQ ID NO: 8 - DNA, 2365 bp, Artificial Sequence
  chemically treated genomic DNA (Homo sapiens)
gtggtcgtggtgggggtgttagttgtaggggtgttttcggtgggtgggagttggtggtttttcgttggtgttatgggattcgtatgttcgttttgcgtttttcggtttttgagtttataggtcgggattttgtttgttagtcgcgtgcgttgtcgtttaatttttgtaggcgtagagcgcgcggcggcggtgatagagaattttgtttggttgtttaaatatagttttttgtagaaggattttgcgttcggggaaggggaggaatttttttttttttgggcgttcgtttttttcgttatggttcggtttttatattcgtttatatttggtcgtagcggggcgttcggggggaggggttgaggtcgcgtttttcgtcgttttttgggcgcgggttaggcggggaggaggggggcgtttcggtcgtgtgtttaggattgttttttagcggttattcgggttttagttttttaggtttggttttgataggcgggcggagtagttagtgcgagatagggaggtcggtgcgggtgcgggaatttgattcgttcgggaggcgggggcggggcgggggcgtagcgcgcggggaggggtcggcgttcgttttttttttttatttatttagttgagttagggggtttaggggttttttcggcggttagttttgtattgtaggagcgcgggcgcggcgttttagttagcgcgtagggttcgggtttcgtcgggggcgttttttcgtcgttgtttttcgcgcgattcgttgtttattagttattatgtcggatttcgcggttaacgcgtagttggatgggattatttcggatttcgaaggtgggtgttgggttggttgttgcggtcgcggacgtgttggagaggattttgcgggtgggtttggcgcgggacgggggtgcgttgaggggagacgggagtgcgttgaggggagacgggatttttaatttaggcgttttttcgttgagagcgtcgcgcgttttcggtttcgtgttcgcgtcgtttacgtgggggattttgttaggggtattcgcgtagattttgcgcgtttttataggattttgtgttcgttttgcgtattgtcgtttgggtttttttttttttattgttgtttgtgtttgttaagcgatagcgattttttcgagggttcgcgaggttgtttcggaattttttaggacgtatagttttattttgggaaatttatcggttttttttttttggtttttttcggcggttttcgggtttcgtttggattcggtaacgggatagggaggtcgttttttattttcgattgagtggatagtcgcgttttgttcgggtggatagttttttttttttttacgttagtttcggggtcgttaagttgtgtagttcgtgggtcgggagtatcgaacggatatagtttaggtcgtggtagggtttagagtgggatgttttatggtttttatttaggtttggggatatttttattcgttttttagaatcgggtcgtgggggatagaaggggtttgcgtgcgggtagggagagtattttggtttttttttgttttcggggtttataaagtgtgttgggatttgcggggttgttttgtttaagtttgggtttggcgttcgcgtttttgagtttgtgagtgcgtgcgtttttttgcgtttttttgattgtcggtgttggggttttgcgttttgcgttcgcgggagtaaatatagtaggcgaaggggaagtttatataatggtttttagcgttttggggtagggtttttgaggggcgggtttgtttttgtcgggatttggagttttcgtttttcggagaggtttttaggttgatttgggtagagttttttggtgggtcgggagggggaaaggttgtgttgaaatgagtaaattgtttaggtgttaggttaagttgggaggtgattagtttgaggtttttttcgttttatggttagaattagggttgatatttgggtgttttgagtttagttgtttatacggtttatttggggttagttttatttgagtgggggaggcggggttttttgggggattagaattttggttggacgttaagtagagtgttagtggttgttttttagggttgggtttgaggagggtgtggggcggcgaagggacgggagggggttgtgatttagtggttattggcgttgtgtagagtgtgagttggaaatatcgtagttattttgttagtttagtggtgaaagtttttttttaggttttatttttttgtatttttgttttttagagggaggggaggtttgggtttgtagagttgggagggtttgttgttttcgttttttttttttataatatttttttatttggatatttttgggtatatgt

SEQ ID NO: 9 - DNA, 2365 bp, Artificial Sequence
  chemically treated genomic DNA (Homo sapiens)
gtatgtgtttaaagatgtttagatgaggaggtgttgtgggggaggggggcgggaatagtaagtttttttagttttgtagatttagattttttttttttttgggaagtagggatgtaaagggatagagtttgaaaaagggtttttattattaagttgataaagtaattacgatgtttttagtttatattttgtatagcgttagtggttattggattataattttttttcgttttttcgtcgttttatattttttttaggtttagttttgaagaatagttattggtattttgtttggcgtttagttaaagttttggttttttaggaggtttcgttttttttatttagatagggttgattttaggtgggtcgtgtgggtagttgggtttaggatatttagatgttagttttggttttggttatggagcggggaggattttaggttggttattttttagtttggtttgatatttggatagtttgtttattttaatatagtttttttttttttcggtttattagagggttttgtttaagttagtttaggagttttttcgaggggcgggggttttaggtttcggtagaggtaggttcgttttttagaagttttgttttagagcgttggagattattgtgtgagtttttttttcgtttgttgtatttattttcgcggacgtaggacgtagagttttagtatcggtagttaagaggacgtaggaaagcgtacgtatttataggtttagagacgcggacgttagatttaggtttggatagagtagtttcgtaagttttaatatattttgtaaatttcgaagataggagagagttaaaatattttttttgttcgtacgtaggttttttttgttttttacggttcgattttgggaggcggatgaggatatttttaggtttggatgggggttatgggatattttattttagattttgttacgatttgggttgtgttcgttcggtgttttcggtttacgggttgtataatttggcggtttcgaaattggcgtgggggaggggagggttgtttattcgagtaggacgcggttgtttatttagtcggaggtgaggaacgatttttttatttcgttgtcgggtttaagcggggttcgagagtcgtcggggagagttaaagggaggggatcgatggattttttagagtgaaattgtgcgttttggagagtttcgaggtagtttcgcgagttttcgaggaggtcgttgtcgtttggtaaatataaataataataaaaggaaggaaatttaggcggtagtgcgtagaacgagtatagggttttgtgagggcgcgtagggtttacgcgggtgtttttaatagggttttttacgtaggcggcgcgggtacggggtcgggggcgcgcggcgtttttagcgggagggcgtttggattaggggtttcgtttttttttagcgtattttcgtttttttttagcgtattttcgtttcgcgttaggtttattcgtagggttttttttagtacgttcgcggtcgtagtagttagtttagtatttattttcgaagttcgaaatgattttatttagttgcgcgttgatcgcggggttcgatatgatggttggtgggtagcgggtcgcgcggagggtagcggcgaggaagcgttttcggcggggttcgggttttgcgcgttggttggggcgtcgcgttcgcgtttttgtagtgtagagttagtcgtcggaggagtttttaggttttttggtttagttgaatgaatgggggaggaaggcgggcgtcggttttttttcgcgcgttgcgttttcgtttcgttttcgtttttcgggcggattaggttttcgtattcgtatcggtttttttgtttcgtattggttgtttcgttcgtttgttaaggttaggtttggggggttggggttcgagtggtcgttgggggatagttttgggtatacgatcggagcgtttttttttttttcgtttggttcgcgtttaggggacggcgagagacgcggttttagttttttttttcgggcgtttcgttgcggttagatgtgggcggatgtggaggtcgggttatggcgaggagggcgggcgtttagaggggaagagattttttttttttttcgggcgtagggtttttttgtaggaggttgtatttgggtagttaaataaagttttttgttatcgtcgtcgcgcgttttgcgtttgtaagggttaaacggtagcgtacgcggttggtaggtaggatttcggtttgtgggtttaagagtcgaggggcgtagggcgaatatgcgagttttatggtattagcgagaggttattaatttttatttatcgagggtatttttgtagttaatatttttattacgattat

SEQ ID NO: 10 - DNA, 219909 bp, Artificial Sequence
  chemically treated genomic DNA (Homo sapiens)
tgttatttgagttgtaaagggtggttttttgtgtttgttttgttgtattgatatattgagttgtgtatggtgtttagtgtagggagaataaatgattatttgtttaatgtgtttatttataggtgaggaaattaaggttttaatttaattgatgtattttgtttttttgattattagaaaagtagtaggataggtgttttgttttgttttattttggtttattaagttggtattttggttttgatttttggttgtgtttggtgttgttgtggtgtttggtgttgttgttttgtttggtggggttgtttggagtgtttgtatttttgtttgtttttatttggttgggtttgttttgtttggatttgggattgggaagtgtggtgatttttggaattagttattggtgttagtgtggggagttgggggtgtagagttgtgggtgtggtgggttatgtaggtggtttttatttttggtttggtttggtttggtttggtttgtgttgttgtgtgggggtgtttttttttaggtttggtgtttgttagttttgttttgttaggtgtagtgtagtgtaggggtgggtgggggtggggtttggtgtgtatgtttatggggtggggagggggtgggttaggggtgggattatagttggttgggttggggttttatgtgtatttttggggaggggtggggtgggggtggggttggggtggggtttggttggtgtattttagatggtgggttgttttttttttttgtttttttattattggtttaggattagtgttttgggagtgtgtgttttgttgttttgttgttatatttttttgggagtggtggttatggaggtattatgaagaagttttatttaggtgggttttgtgtttggggtggggaggggttggtgttttgggattagtgttgtttatttgagtgtttgtggttgggagtggtgaggtgtttttggagttgagtgagtttttgtggtgggtatattgtaggttgagttttttttaggatagggttgttgttgggttgtttttgatttgagttgattgttttttgtgttgtttttagtttttgtttgagtgttggaggggttgttttgggggatgtttttttttttttgttttttgtatttttgtaggaattgttgattttttaggttggttgggtgttttgggtttttgtgtgtttgtgtgggtgaatggggttggggttaggtggaggggtgtttttgggtttagtttttagggttggtggtttaggttgtagtattttttttttggattttttttggttttttttttatttagtggggtatgggatggtttttagatgggattgtttagtagtgtttaaatttggtgatttgggtttatgttttgtgtttaggatgttgtttgtggttgatatttttattttattttagtagggtttgttttaagtaggtgaagggggtttgatttgggttttattatgagttggtttaggagtttttattttataagaggtttttgttttggtattttgaagttttattttatagatgggtatattgaggttataagggtaggttaagagaaatttagatttttattatttgtttttttttttttttttttttttttttgtggttttttttaaaggatttaggtaggtaggattttttgttttttttagtttttaaattataaatagtgtttttttttttaaatttagaaattgtttgtttaatgttttttttttaatttatttagatagaaaggtatttgttaaggatttatgaattaatttttattgataggagaatagaattatgggttttagttggaggtgaaggagttattggggttatttttttgtttttgggttattgttggttttttttggttttttatatttaggaattaaaatgagtgataaagtattttgttttaaagaggattatttagaatttttttgaaaatatttttttgggttagtagtttagaattttaatttttatttggttgttgtgaataagatggttttttatgtatttggagtatagttttgttaggagtgtgggtgggttggtgtgttggtgggtgggagtgggtttttaggtggtatatgtttggttttggtattggggttttttttttaatatgttttaaatatttgagattgttgtggggattgtgtggtgtatggttttttttaggggatttttagtttgtttagggagggttttttgtttttggttttttatattttattttttattggtgggtttagatagtgggggtgattggggtttttttaggttgtgggttttgggttttttttgtggagatttttttgtatagatgttggaagggttttgaggtaggtttggagtttttgtatttgtggtttattgggaggtggggagattattatttgtttttttttttttttttttatatatatttattttattttttattgggttttttttttttttttttttttaaaaaaaaggatagaattttttgtagtaggtggaagtagagtttgtggagtgagtaggaattaatttttgtatagtagttttggtgtttttttgtgtttatttaaaggggtaggtttttttgaggatgggggaagggagggtttagattatttttggtttgttttttgtttggtagtggtttaaggtgtgttgggttattgtgttgtagttgtatggagtgggattggagggggttgatggtgggggtggttttttgtttttattttgagtgttttggagttgttttggtattagtttttttttgggtatgggtatttgtaggagttaggttgattttttaataagttattgatattatgaaattaaggaaagtagtaaaagatgttaaaaattttttaaggttttgataatttaaggataataggaaggtttttatttttttatttagattgtgtgggattattgtttttagatttgtatgtgggttttagaataaatggaatgattataatgttgtttttggtagatttggtttgaatatttgtgagtttttgaaaaggagaaagattttagaaggatgtgttggggtaattttaagtattgtgggtttatagatagttattgaagatattttatgtgttgggtatatatggttaagtttgagtgggtatagaaatggtaatgagatatagtttttgtttgtagagaatttatatttttattgggagttaggatgagggtgagatattagtttattaatattttttttttttgagtagtttagtttttaaatattataggaatgttttggaggttttaggtggaggtgagattgagttgggttttgaggaaggagaagttttgagtagtggagaataaaaagggatttggttaggtgtgtttgaagttttagttatttaggaggttgagatatgaggattgtttgagtttaggaggttatttaggaggttgagatatgaggattgtttgagtttaggaggttatttaggaggttgagataggaggattgtttgaagttaggagtttaaggttgtagttttgtgatagtgtttggaaatagatatggtattttagtttgggtggtgttatgagattttatttgtaagaaggttttttttaatgtggaaggtagtaagggtttatatagggtagttgtaggatttagggggatattggggataggttttttttggtagttttattgttgttttaggtttttttgattgttttatttggttttttaatggggtggaggtagtggtagtttataggtagtgtggtttagtggttatatttgggggtttagagttgttagttttttgggattaaattttattaggttgtgtttttttttgtggtataaggtttttattttatgtattttatttgttttatttgtttttttgtgtgtgtggtgttttttaattttatttatttatttatttttgagatggagttttattttgttttttaggttggagtgtaatggtatgattttagtttattgtaatttttgttttttaggtttaagtgatttttttgttttagttttttgagtggttgggattgtaggaatgtgttattgtgtttagttaatttttatatttttattagagatggggttttattatgttggttaggttgattttgaatttttgattttgtgatttgtttgttttggttttttaaagtgttgtgattataggtatgagttattatgtttagtttgttttatttgttaaatgggatagtgttatgttgttgtaaaggttaaatgagtttatatttgaaaaagttgagaaatgtttgttttgtaatttgttagttgttgttatgattatgattgttattgataggaggatggagaaggttggggttatgttattgttaggatgttttagaagtttttatgatttttttttattgtggttagagtatggtgtagggttttttttttagttttttagtattggagttagttgtattgtatttgttttggttttttaggttttgagttttgggattttttttgtatattaggttatatggaatttgttgttatttttaggtttttttggaaattttttgtgggtggtagtggtaggaggatttatttgaggttgatgagttatagaagtgggattgaggttgtgttatatttttattggtatttgggaattattttggagattttttttttattttttatttttttgagatggagttttgttttgttgtttaggttggagtgtagtggtatgattttggtttattgtaatttttgttttttaggtttaagtaatttttatgttttagttttttgagtagttgggattataggtatgtgttattgtgtttagttaatttttgtattttttagtagagatggggttttattatattggttaggttggttttgaattttggattttaggtgatttatttgttttagttttttaaagtgttgggattataggtatgagttattgtgtttagttattttggagtttttttgtggtttttaggagatttttgaaggggtattagttatgattaaaaagttttatgttgttgtgatttttgagttttgggtagggagggaggttgtatttatataggaagtagtttttgttgtgatttagtgtgttggtttgttgtggtggatagggttgtatttttatttagtgttttgggagttgatttatgggaagggtaaggaattgtatttttagagaatatttttttagttagttaatttggtgataggtgagtgtgggaagggtataagtatagggtttttttttttttttttttagttttgtttttgtgtttgtttttgttgttttttgtttttttatgtttaagtttgtttgttttggtgtatttaggggatttggattggagagaaaaagttattttgtatggttagtttgtggttttgtttgatttgtgttttttgttgaggttttttagttgtgagatagttggttgagtttaagttttggggttagttttttttttagtttgttgtaaaggtagaaaggtatgtttaggtaggggttatttgttttgtttgtttatgttagattgtaggtatttgtttgttagatttttttggtttgtttagagggattttgatagttgagggtaatgtatttggtagtggagtattgtgtttgtgatagtttattttttttttggaattattttttataagtgtgattagtttaagttaggataggtatagggggatttaggattgttatttaggggtagtggtttggaatttaggtttaggtgatatgggagttaattttttgtttggagattttaggtgggtgtttgtagaggatattttatttgaggatttatggaaggggatattttttattttttatttggtttttgggttgtttttttttgatatttttttgttattttaggtagttttgatagttttatgtgattgggatttagaggtggtttttgtttttgttttagtgtttgtttataggtagtgttgtgtgggttttgaagtttgtttaagatggatttgataaggggagtttagtatatattagtgtaggtttggttagggggtgatgatggtagtttttgggtagatttagttggttttagggtaggaggggttttagagagaggttttaggtttttaggggtgtgaatttttggggtgaggtgggaagtgatgtgttgggtttttgtgtttttgtttgttggagttattattttggaaatattttagttttaggtggttgttagggatttatggggattagtgggtgttaatttttgggtgaagtttttggggtttgtatatagtatatagtgttgtggttttatggtttattttgttgtgtgaagtggtttagtttttgggagagtttttagttaggtaggtttgatggtaattgttaggttatggtgatttggaattgttgattaaagggagttagttttggtgggtggagggatttggtgggtagttattgtgatgttaggtatggggattgtgtgttatttaggtttgtgggtgttgagtttttgtgggagtagtgaagtgtttttgtggttgatgggttggttatttttgttttttttttgatgtgatagttgtgtttgggttttgggaaatttgttaggaggtttggtattggtttgttttattggagtggttttgttgagttgtgagttgtttgtttttttgaggtttttagtttattttaattttttatgtggatttggttatttattttagaagtgtttgttgggtgttgttgagtgttaggttttgtttgtttttttttttgtatgttggaggttttgggtattagttttgtagggtggtttggttttgggtttttagggtagagtatggtattttttgtttttagtttagtttttttttgttttatttttttgattttattttgggtatgggtttatttgtagtttttgtgaagggagatattgagttgttgttggtagaggaggggtggtttttgggtattgtttgttaatggttttttggtagttttgtgatagttgagttttgtttttagtttaatttgatttggttttttaaagtatgattgttggtagtttgaaaatttttaggataggaaataggagtggtgtagggaatgtaagatgattttagttttaagttattgggtggtttttagatttaggttgtttgttgtttttggtaggaatttaagttgttggttatttttagagtggtgttggtttggggtttttagtggtttttgtgtttgggtgagaggaattttggatggttattttgttttgagtgtgtgggtttttagaagtgttgggttagggggtatggagggttagaaagttttttttggagtgttggatttttttgttgatttttattttattttggtttggggttttagagaaggggtttaggtaggagtgttatttttttttaatggggatgtggttttagtttttgtttaggtgggtgtattgttttttttttggttttttttaggttgtttaaatgatttgtgatgaggtttgtgttatggttggggttttttgttttttttagtgttgtatttgggaattaggggttgggttttggaagttgaggatgtttttgaatgttatgtttgggtatttgttttggttaggtgaggtgtgttggggtagtggttgagatgggagtagtagtattgtttgttaggtttgagatgggttttgggtgagtgtggttattaggaagggttgggtagagtaggtgggtgggttgtttttggggttttgttttgtagattaatttgatttgtattttggggttggggtttttttttatagtttttttatgaattatggtttttgtttttattttaaattagattttagaagaggaataatgtttatgtaatttaagttagttggaagtgggttatatttaatttttgttattttttagtttgttaaggatttgattaatttaatttagagggatttggagggttgtttgtaaaatttattaataatagggaattttagttttgtagttatagggtttatagaggtgttgggttgttgggttattgttgggaggtgagttggtggtgtagatattatggaggtattggtagtggaagagttgtaagtgtatatagaggttggtattgaggggtggggaggaggaggtggtggattttttgttagtgttggtattatgttgtttttagtattagagatttaaggtgtggttgattttggttggggtgatgagttattggatagtagagtttttttggtagttgggggttaatgttttaattgttgggattttgtattatgttgttttttttttttgttttgtttggtttggtttggtttggtttttgagatggagttttattttgttatttaggttggagtgtggtggtttaattttggtttattgtaatttttgttttttgggtttaagtaatttttttgttttagttttttgaatagttgggattataggtatgtgttattatgtttggttaatttttgtatttttagtagagatggggttttgttatgttggttgggttggttttaaatttttgattttaggtgatttatttgttttggttttttaaagtgttgggattataggtatgagttattgtgtttagtttgtatttatgtttttttttttttttttttgagatggagttttgtttttgttgtttaggttggagtgtaaaggtgtgattttagtttattgtaatttttattttttgggtttaagtgatttttttgttttagttttttaagtagttgggattataggtttgtgttattatgtttggttaattttgtatttttagtatagatggggtgtttttatgttggttaggttggttttgaatttttgattttaggtgatttgtttgttttggttttttaaagtgttgggattataggtgtgagttattgtatttggtttatgttttttattattattatttaattttttaaggaaagtaatttaaattgtatattgtatttttttttttttttttgttttttgttgttagttttttgtattatttattgttaaataatatgaataggaaattgaaaggaaaattttaataattattggttgtagtattttttttgtgttttatttagtgtttgtttttttaggaatatgatatagggtttgatttaattatgaaaggtgtatatttttagagttttatattttttatagaatgaatgttgaattttgttttttttatttgaaattagattttaggtatggattttatgattattattataatggttttttagagtggatattgtattttgtagggaattattttttttttagttgttggtgtggatgtttttttttgatggtgtgggtttgggtttttgaagggtggtgttttgagtaaagatgttatagtagttatgtttatagttttgggtttggggttaggtggagattggttttaattttagagtttgttgttttaaaataaatttttttttttttttttttgagatggagttttgttttgttgtttaggttggagtgtagtggtgtgatttttgtttattgtaagttttgttttttgggtttatattatttttttgttttagtattttgtatagttgggattataggtatttgtttttatgtttggttaattttttgtatttttttagtagaggtggggttttattatgttagttaggatggttttaattttttgattttgtgatttatttgttttagtttttaaagtgttgggataaaataaatttttagggttgggagtggtggtttatatttgtaattttagtattttgagaggttgaggtgggtagattataaggttagaagattgagattatggtgaaattttgtttttattaaaaatataaaaaattagttgggtgtagtggtgggtgtttgtagttttagttatttgggaggttgaggtaggagaatggtatgaatttggaaggtggagtttgtagtgagttgagattgtgttagtgtattttagtttgggtgatagagtgagattttgttttataaataaataaataaataaataaataaataaatttttatatttatttgtattatttattattattattattaaatagggttttgttgtgttgtttaggttggagtgtagtggtgtgattatgattttttagttttgattttttagttttaattggttttttttttttagttttttgagtagttgggattataggtgtgtgttgtatgtttggttaattttttttttttttttttttttgagatagagttttattttgttgtttaggttggagtgttgtggtgtaattttggtttattgtaatttttggtttttggattaaagtaatttttttgttttagttttttgaatagttgtgattataggtatgtgttgttatatttggttaatttttgtatttttagtagggatggggttttattatgttggttaggttggttttaaatttttgattttgtgatttatttgttttggttttttaaagtgttgggattataggtgggagttattgtgtttggtatgtttggttaatttttaaaaaatttttgtagtagttgggtgtggtggtttatgtttgtaattttagtattttgggaggttaaggaggttgggagtttgagattagtttgattaatatggagaaattttgtttttattaaaattataaaattagttgggtatggtggtatatgtttgtaattttagttatttaggaggttgaggtaggagaattgtttgaatttaggaggtgggggttgtagtgagttgagattgtgttatggtattttagtttgggtaaagagagtgaaattttgttttaaaaaatttttgtttttgtttttgtagtgatagggttttgttttgttgttgtttaggttggtattgaatttttagttttaagtgatttttttgttttagttttttaaagtgttgggagtataggtgtgagttattgtgtttggtttttatttgttttggttgtttttttttgttttaggtaattatatatttttttaggtaattaagaaaagattgtgtatgatgagttttttttttggtatttttgggattgtttttaaaattagataagtgtttttattttgatattttattaagattttaatgaatagaatgttgtttgtttttagtttgttggtttttttgtgaaggtttagggtttttttgtttgaaaagttatttttttgttgaggtttttgatttttttttattatggtagttatgttgagggtttatagagttattttttttttattttttttttggttttttaagatgtatttgtatttttggagatgtttttttgtttttttgggttattttttttggttgttatttattttgttgatttattatttgtgtaatagttttttttggaatttttaggtttttgttatttattttttgtagtttttgttttgttttttttgttttagtttttttttttattatttttttatttgttggtttttatttttgtttatggtatatttttgtgttatattttgatggttggataaaggttgagtgaaatgtatttatttttttggtgattggggtgtttattaattagaagggatttaaggttggtgtagtttttttttgtattttggggtattgttttgtggtttttttttgttggagtttgtagttttttgtttttttttttttaaattttttgagatggagttttgttttgttgtttaggttggagtgtagtggtgagattttagtttattgtaatttttgttttttgggtttaattaatttttttgttttagttttttaagtagttgggattataggtgtttgttattatgtttggttaattttggtatttttagtagagatggggtttttttatattggttgggttggttttgaatttttgattttaggtgataggtttgtgttggttttttaaagtgttgagattatgggtatgagttattaggtttggttgttgagattatttttataagttattaggtttggttgtagttggtagtttttgattattggttttgttttatgtgatttgtgattttttttttggttttttggttttgttttgtttatttgtttattttttttatgtatgtggtttgtttatagggtatgtaatggggtttaattaggaaatggaaattgtttgagtatttatttatttatttatttatttatttatttatttattttttttaagataaggttttattttgttatgtaagttgaagtgtagtggtgtgattatagtttatggtagttttgaatttttgagtttaagtgattttttttttttagttttttaagtagtttggattataggtgtatattatatgtttgtttaatttttttttttatttttgtagagatagggttttgttttgttgtttaggttggttttgaatttttaattttaagtaatttttttgttttagttttttaaagtattggagttataggtatgtgttattatgttttgttaatttttgtattttttgtgtgtgtgtaaagataaggttttattatgttgtttaggttggttttgtatttttgggtttatgtgatttttttgtttgggttttttaaagtgttgggattataggtgggagttatagtgtttggtttatttgagtatttagaatagaaggatttaaaggtggggaattagttatatagatgatgggagaggtgaaggttagatagggaatagagaggtaattagtaggaaattaaagtggtgtgggtttatatagttttttaaaggtatggatgtaatgatttatttagaatgagaaaataaataatagtaaattataaattataagtagttgttaaatattataaatattattatatgtagaagagtattagttaattgttagttatatttttaaagttttattttttttatatttttggtattatttttttaatatgatgattttgtaatattgttttttattttgagaatagaaaattgattaggttggatatagtggtttgtgtttgtaattttagtattttgggaggttaaggtaggtggattatttgaggttaggagtttaagattggtttgggtagtgtggtgaaattttgtttttattaaaaatataaaaattagtagggtatggtggtatatatttgtagttttagttatttaggaggttgaggtgggaggattgtttgagtttaggaggttgaggttgtagtgagttgtgattatgttattgtattttagtttgggtgagagagtgagattatgttttaaaaaaaaaaaaaaaataataaaaaaaaatataggttgggtgtggtggtttatgtttgtaattttagtattgtgggaggttgagatgggtggattatttgaggttaggagtttgaaattagtttggttaatatggtgaaattttatttttattaaaaatataaaaaattagttaggtgtgatgatgtatgtttgtaattttagttatttgggaggttgaggtaggagaatggtttgaatttaggaggtagaggttgtagtgggttaagattgtgttattgtattttagtttgggtaatagagtgagattttattttaaaaataaataaataaataaagtgaatgaatttttttagttgattaaattttgtttttatttttggtagttgggatgtatataaaagtggtggttaatatggagttggtggtgttgttataattgttttgtttaagatatataggaattttggtaaattttgtttttttttttttttttaaatgtgatttttattaagaaagaagtaggaaaatgggggagatttttaattgtatatgaggtatttgtgtatgtatttttgattagagagatttttttgttttgattttatattgaaggaattgaattttttgtttataattttatttttggtgatgggagtaattttttatagatttgtttttggatttgtgtattttaaattttgtttttttttattgtgtatgtttttttggtgttaggtattgtaggatatgtttgtgttttgtgatttttgattttgtgtggtaggtggaattggaatggtgagtggagtgagtattgttggaatttgtttttatattgggatagtgagtagtaattgaattatatatggaaataaatgggaattatataaatataatttgattaaagttaaattaaatatttttttagtttaatttttttttagtaggagtttttatgtggtagtaagtttttgtttttattttatataagagaaaatgtgatgggtaggaatttaagattggaaatgaatggggatgttaattgattgtagggaaaatattttttattttgtaaattttataaaaaatgtttgattttgtggatatgtggttagggttttttttagtgttttgagagggaattatgtaggtagagggagggtttttagtattgtgggggtgatttggagattggtagtagggtgttattattatttttaggtggggatgagagggaggaagttttgtgattagagtttaggggttagagttatttgttgggagtttaaataaaggtgggattttggtaggagttggaattatatagaggattattttttttgttggagaagttgtttgaggtagaggaggtggagagtttttgtgtttttttttgtttttattttttaggttttttttaagttttttgttggttgaatttagtttaaagttagtaggtttggggatttggatatttgagttagtagaggttggtgttttttttatataaaggagggtataagaagtgggaggtatggagggggattaggttaggatttatataggatgtgtaaataggagtttttttttttttttattttaaatggtatttgtagttggttttatttttttgttgttagataggaagaggaattttgtttttggtattagttgtttttattgttttttattttatggaggttttttttttttttggtttttgtttgtaattattggtgatgttgatggattatattttttggggagtttggttatgaatatggttttttatttgttgtggattaaattgtgtttttttttttgaatttttgtgttgaagttttaatttttaatgtagttgtaattgaagatagggtttttagggaggtaattaaggttaaatgaagttatagggtaggattttaatttaataggattgatgtttttataagaagagggagagatattagagattttttttttttttttatttgtaaatagaggaaaaatgatggaggatatagtagggaggtgggtataagttaggaagaggggttttgttgggaattaattttgatggtattttgatttgggattttgggttttttaaattgagaaatatatgtttgttgtttaagttattttttttatagtaatttggatggtagtttgagtttattaaggtattgtttgtattagttagggttttttagggagatagttaataggagatggatggatggatggatggttagatagatagataagtggatagagagagagagagataggtagatatagatagataggtagataaatggttagatagataagtagatagagagatagagatagatagatataaataggtaaatagataggtagataaatggatagatagatgatagatagttaggtaggtagatagatatagataggtagatagatagatagatagatgataggttgggtttagtgatttttatttgtaataattagtatattggtaggttgaggttggtggattatttgaggttaggagtttgagattagtttggttaatagggtgaaattttatttttattaaaaatagaaaaattagttgggtgtggtggtgtatgtttgtaattttagttatttgggaggttgaggtatgagaattatttgaatttgggaggtggaggttgtagtgagttgagattatgttattgtattttagtttaggtgataaagtgagattttattttaaaaagaaaaaaaagatagatagatgaatggatagatagttagatagatgatagatggatgataggtagatagataattgataaatagatataaatgattgatggataggtagatatagatatattgattaggtagatgatagatggatagatagaagatagatggtggatgggtgggtagataggtagatagatagttagaaagatagatgatagatagataggaaggaatttattaggggaattggtttatattattgtggaggttaagatgtattatagaaggttgtttgtaagttggaggtttaggaaagttagtattgtggtttagtttaagtttgtaggttttaggattgggaagttgttgatgtaatttttagtttaaggttaaaggtttgagagtttggggaattgttggagaattgggagttttaagtttaagggtaggagaggaaggtattttatttttaggagaaagagggaatttattttttttttgtttttttgttgtttggtaatggaatggtgttatttatattgagggaggatttttattatttagtttattaatttatatgtttattttttttagaaatatttttatagatatatttagaagtgatgtgttattagttattttttaatttagttaaattgatatttgttgttagttattatataggtttagaagaattgtggttgtatggtgatggtttttattttgtttaaagaagttgaagatgaattgttggtataagttattgtttttttaggttttttttagttgtttatttttttaaaaatgtatttattgagtatttgttgtatgttaggtgttgtgataagtattggggtatagtagtgagtaaataaggatttttgttttttggagtttatatgtagtagaaggaaatagaattaatgaatttattagttttagaaattattaaaataggattaagagttgtggtgagaattaagataaggtgattgtatagaaagtgattgatggttgttttggaatgagtggtgaggggttatagagatgatgatagttgagttgagattgggaagataggaaggagttagtagtgtaaggattaggttggaagtaagtttggtgtattttaggaatagtaaggaggttagaggggttgtagtagagtaggtgaggaggaggagggagatgtaggttaaagaggagtttggggttagatggaggattttttttttaaagtttagttattttttttttaaaggagaatgtgttatttttaaaagttatatatgttagtatagtgtttggtttattatatgtttttagtaggtggtgagtatggttgtttttgttattattatattataattattaggaataatggagttattaggttttgtatttatagtaatgtgagggagttagtaagtttttttggggaatttatttttttttattaagtttataagagtttgataattaggttaatgtagtgagagttatagttgtttagtgtattggattttttagttatgggttaggatatttttattttagtagaaatttttaaggggattggggagtgtgttgtggatgtttttgggttatttagattttttggggagttttttttattgtagttgttgtagggagtttagttgtagtgatgaattgtggtttagttttgtttatgggaaaattttatatgggagatgggatggttttttgttggtttttttggttttaggttgtttttataagtgtagggatttttatttgggtgtgtgaatggggtttaggatgttttaagggtatgtggagatgggggttagttgttttttttgatgtttttgaattttttttttttgtttttttgtattttattgttttttggttttttttattttgggtgttttggaataatatgtaatttaatatataggttgattttattattttgttttgttttattttattttattttggaaataaaggttttgttatttagtttggagtgtagtggtgtaattgtaatttattgtagttttgaatttttgggtttaagtgatttttttgttttagttttttaaagtgttgggattataggtatgagttgttgtgtttggtttaggttggttttaaaagttttttattttttttgtattttgatgatatttattttttggagtaggtttttagttattggttttggatattttgtagttattattggttagttgtggtatgtgaagttgaggtttaggagaagggtagttttgtttaaggttatatggtttagtgttaatatttagattttagtgtttttattttttttttggttgtttttatttttagtgtatttttggaggtttaagggagttaaaggttaggttttggttagttaagaatttaaaaaagttgtttttgtgtttttttgttaatttattattttattattttttttgataatgaatttagtttgaattttagataaataaggattaatttttagtataagtatattttataatagatttgggatatatttatgtttaaaaatgatttattgtttgttggttttagtagtttatgtttataattttagtgttttgggaggttatagttggagaattgtttgagtttaggagtttaaggttatagtgagttatgattatgttattgagttttagtttgggtgaagtagtaagatttttatttttttaaaaaattgttgattgtttatttgaaatttaggtttaattgagtattttgtattttatatgagaattttatataggtgagatttagagttttaatgtttattggtaagtttttgtagggaggttttgtgggtttttggttggtattgatgttttgtgatgagtagggttatttggtaaggtggatgtttgttgtttatgtaggtagagtaaggttttgggtaggtatgagttgattttattttttttagtttgggagttagatattgttggtagtttgttgttaagagaggggttggttattaagagaggggtggtttttatgggttttttttggtttttggtttttttttagttttttttttattttaaatagaggttaatggtattgtattagaattagtgtgttgttttttttggttggtattttgtagttgggtagattgttttttttttataggagttggtggtgttttttttgttttatagggaggatggttgagatttttgattttgatatagggtgttgttttttttttgttttgagatagagttttggtttttttatttaggttggagtgtagtggtatgatgttggtttattgtagtttttattttttgggttttagtaatttttttgttttagttttttgagtagttgagattataggtgtgtattattattgagaataatgttttttatagtgtttatttttttgtaggagtaagtttttaaggtaaggaggttgttttttttatggatgaataaattgattttgatttatagttttatgtgttagttttgagggtggggaaaggttgttttgtgtttaggtagggggtgggggtaaggttaggagggtttggtgtttagtgtatttttttaggatataattttaggtagtagaggttaaggatagaggggaggagaagagggaggtggttattatttttttattttagttttttttggagataagtttgagtattttagttgtttattaagtttggagataagtttggaatttaaatttttgattttgatttagttttttatagtttttgtgagtaaattgagttttagaaaaagggagtgaagtttgtgtattttggatgtttttattttaggtttaaattgtttttattttaggtttaaattgtttttattttagtttaaattgtttttattttaggtttaaagtgtttttattttagtttaaagtgtttttattttaggtttaaagtgtttttattttaggtttaaagtgtttttattttaggtttaaattgtttttattttagtttaaattgtttttattttagtttaaattatttttaatataggtttaaattatttttaatttaggtttaaagtatttttattttaggtttaaagtatttttattttaggtttaaagtgtttgtaatttaggtttaaagtgtttttattttagtttaaattgttttattttaggtttaaattgtttttattttaggtttaaattatttttattttaggtttaaattgtttttattttaggtttaaagtgggaaggagttatagggaaataaatgggggaggtatggatgattaggatgagggtttttatgatttatttttttttaggggttattttaagagttttttaaatttttattattttttaatagagatggggttttgttgtgttgtttaggttgatttttaatttttagttttaagttatttttttattttagttttttaaattgttgaggttataggtgtgagttattgtatttggttttttttaggagttttaagaaaaaaaatgggaatagatttgtgtgtgtgtgtgtgtgtgtgtgtgtgtgtgtgtgtgtgtgtgttttgagaaagagttttgttttgttatttaggttggagtgtaatggtatgattttggtttattgtaatttttgttttttgggtttaagtgttttttttgttttagttttttgagtagttgggattataaatatgtaggttgattttgtatttttattagagatggggttttattatgttggttaggttgattttgaattttggattttagatgatttgtttgttttggttttttaaagtgttgggattataggtttgagttattgtgtttggttaggaatagatttttttttgtagatgatttttgttattattgaaaatggatgtttatgtataattgaattgttataatgttttattttaaaaagtttttttttgagaaaatgtgatttttgatagaggagagattgtttaggttttatttattgttagtataaaggtagagtaggggtgtggtggtgttatttttttttgagatagttttatttttgttttgtttaggggtttagaagtttggtttatttgagtttatagaggggtttggagtggttgttttatattataggtggggtttgtaaggatttgaaatgatttttgagaaggtgggtgtggtgggtgtattttaattattaaagtaataataatgatatattaaatagtgtttgtttagattttgagtgtttgtttaaatatttttattttgtgatttgttagattttagtataataatttaggtaaaagaaaaaatagttgggtgtggtggtttgtgtttgtaattttagtgtgaggttaaggtaggaggattgtttgagattaggagtttgagattagtttgggttatttgagattttatttttgaaaataaataaattaataaaagatttttatgttttatgttttttttatatttaggttttttaaattatatgtattggggaaagtttattaagagaagtttttggttgggtgtggtggtttatgtttgtaattttagtattttgggaggttaaggtgggaggattataaggttaggagtttgagattagtttggttaatatggtgaaattttatttttattaaaaatataaaaattagttgggtgtggtagtgtatgtttgtaattttagttatgtaggaggttgaggtaggagaattatttgaatttgggaggtagaggttgtagtgagttaagttggtgttattgtattttagtttgggtgatagaaaaagattttatttttaaataaataaataaagggagagaagtttttgggtttttagatatatgggttagtgtttatttttgtaaagttgttgtgtttaaagaggggttgtatttggtggaattggggtaaaagagtagggagggtattgggtagttgatttggtttttattattggaaaggggttgtgttgttggtgttttgagttggttttataaggaagatattgtatagggtgttttaagtttgttttttttgtttaggtttatttttttttttttaggattagggagttttgtttgttttttgtttttggtatttgttttttggtttgtgagtattgtatttttttttgtttggaatgttggtttatggtgggtttttggatttttgttttttgttgttttttgttatattttgttaaagtgtgttttatttatttattgttattattttttgaaatagagttttgttttgttgtttaggttggagtgtaatggtgtgattttggtttattgtaatttttgttttttgggtttaagtgatttttttgttttggttttttgagtagttgggattataggtgaatgttattatgtttggttaatttttgtatttttagtagagatggggtttttttatgttggttaggttggttttgaattgattttgggtgattggtttatgttagttttttaaattgttgggattataggtgtgagttattatgtttggttaattattataatattgatattataataatattatagttagataatggtgattaatgtttgtaatttgaatattttgggaggttgaggtaggtagattatttgaggttagtttgagattagtttggttaatgtggtgaaattttgtttttattgaatatataaaaattagttggagtgtgatggtaggtgtttgtaattttagttatttgggaggtggaggttgtggtgaattgagattgtgttattgtagtttaatttgggtgatagagtaagattttattttaaaagtagtaataataataataataataataatattatttattgagttttaattttgtgttaggtattgtgttagtatttgtgttatgtgattttattgatttggaataatttatgagtaagtattatttttgtttttaaggaagttgagatttaggaaatggaagttattttttagggtttatagtaagggtttggtgaggtttgtgtttaaattttgattatttgattttaggtttttttgttttttttgttttttaaaaatttaaatatttttatttgggatgattttagatagttagattttaattgttttttttttttttgagtatgttttattttaaaattatataaagataatttattttttaattggagttatggaattgttagatgttttggagatttttttagttatttttttgttggatttagatataggtttgaataattaggtttaaggagttgaattggagttgtttgtggttagaggtttttttttgggaatagtagtggtggtagtggttgtgttgagtttggtaatttgtttaagagtaggggatgtttaggttgtgtttgttttttttttatgaatggtttgttttgtgttttttttgtgttaagggttgttaggtattagatgtttattttaggaaattagaaaaataaatagtgtaaataaaataaaaattttatttaagaaatttgagatagatgttgttttttttattgtttttttatttttatgttgggtttggagagagtgggttagtatgttttttatggataagaggttttggggtatttaatttggatggaattttttttattttttttttgtttggtgttagggggtagaaggtaggggtggtgtttatttggtttagggaggaggatagggtagtttttgttgttggtattttttgtagagatgttttagttagaagtgattttatttttaggaatgtgtgttttgttttttgttgggtggtttttttttattttttattgtttttatagtggggtgtgttagatttatgggtagagttttggtttatttttagttttggatagtagaatgttttagtagtgtattgatggtgtgtgtgtggggatgtgtggaataggggatagtgattttgtgtgtgttatatgtagtgtggtttttagttgggtgtgtgaagggggtgtttatggttattgtggaagtgagtttagttggggttggagggtttaggtttattgtatgttatttagtagttttgggagtggggtttatttttttttttgtttttttttttttttggttttgggtagtttattggagttgtattttgggttattttttttggttttaaggaggttgttatttttgggaggtagatgttggtttttttatttttgttttttggagatttgtgttgaggtttgtttttttgtttggagggattggttaggaatttttgggtttttttggtggggtttttgttgtttagtagtgagtagagtgagtgggtattaagaggaggatgttgggtgaggttatggatatggttggggtaggttgggggtgttggaggtgaattttgtagttgtgtgattttgggtagtttgtttagttttgggttttgtttttttttttatgaaatggggtgggagtatttgtttgttggggttgtgggttgggtgaattggagttaaggtatagtttatagtttgttgttagatttttgtaagtagaagtgggtgtttttgtttagtgttttttggttttttttttaaggtttagttttgtttttattttttttatgaagtttttttggttattttaggagttatgatttatattttttttggagttttgtgttatatgtattttttatggtgttgttttttttggaggatgggtttaattaaaattggggtttatttgggggttttttttagtattagagaagtttaggtttagtagagatgggtattttgttaatattagttttgtgaaggatatattgtgtttattttgttgttagttgttgagtttggtgttttgtagttatggaatatgtgtataggtttgggttgttggatatgaaggttagatgggtagtttattttgtttttgttttgagtttttagaaataagttggttgtatttatttttatttggttatagtttaggagtggggttgtggaatggatggaaggaaggatgagtgggtgggtgggggggtgggtgggtgggtggatggatggatggatgatgggtggatgggttgatggatgggtggattaggtggataggtgaatggattggtgggtgggtgggtgggtgaagggttgaataggtgggttgggtggatgggtggatggatgtgtggaggggtggtggggtggatggggtttatgggtgaatggatggatggatgggtgaatggagtaaatgagtgggtggatggatggatggatgttgtaagagtttttttggagggttttagggaggaattggtatttttgattagtagttagtatggtgattagatatagggaggtgtttgggtttgtttgattttttattttattgttggtgggattgggttggttatgtgtttttgaagttttttgaagggtggttgtatggtattgtttaggggatatttttagagtgttgtgttttatagtaatagggtggttgtttgtgtttttagggttgttttttttggtagttttttgggtttgtttggtttagtattttagtaaatttttttgagttaggatttgtttgttatgagtttttttaataagtagttttaggttaaggtttgtgtgtgggtagagggagtgtatgttgtgggaggttgtattaatttgaggttttgtttttgtttttttttggggtaaaaggtaaaaatagtttgttttattttatttttaaatttagtttggttgtatttagttttgggagtgaagggggttgggttaggattgtttgtgagttgtagattttggtgtagggaaattttgatttataagatgggtggatatggaggaaggaggagattttgtttagtagagatatgtttgggtgtagtttagtttggagtttgatggatgtgggtttatttgtgtgtaatttttatttattgtgtggttatagggaagtgatattttgtggagatttagattttttatttgtaaaataggggtagtagggtttgggggaggatgtgtgtgaaggtttggtttagggtttttttagtagttagatagtagtggttgttatttttttagtgtttagggttatttgggggagtagggtttttgtttttagatgggttttgtttttggttttggaatttatagtaggagtaaaggtgaggatatttttggtgttaattatttatttggagggagagtgttagtggttttgtgtgatttttgttttttgtttttgtttttaggaggtatgtggatttttagtggttggttttggaggtttggtgattttagtggtttaggtaggtggtttgttttgttttggttttatttagtttatgggtgtgtttgtgttggggtttttttattttggtttgggatttgtttttttatttggtttttttggatgagtggggttatttgtttattttttagggagatgtagtttttgatggttttggatttaggtggtttttaggtttgttgatgttgttttgttggagatgatttttgtgggggtaggggtagttatttttaggtttagggagtaagtttgtgtgtgtgggatagaggagagaataggagatagatagggttggatgatttggtttgagatgttgaggggatagatgtgttatggataggtggttttggttgtgagttttttggtgttggtttagtatttgtgggttttttgtaattttgtaggatggaagatgttttaggatagagtagatatgtttggtgttatttaggaggaaataagtgggtttttggtagtggttattgtgttattttttgtgttttttttatgtgtttggaaattttttatattaattagtagggaagggaaatagatgtatttattagagttttggggttggttgtttaggatatgagttatagtttataggtttgaagggattttattaatattgggtgtagtttgggtaagggagtgggatagagaggttagggttttgtttttagtttttgttttttagggttgagtttgtgtgttattttttttttattgggtgtttttgattttttttgtttgattttagtgtggttatgttagtgtttttgtttttgggagtttatgttgtttttggttgttatttttagtggttaggttgggataggtgtttatttagtggtttttttatttggagaggatgatgggttatagtaatgaatggatttattttttttaggagatgaggagttttgagaagagtagagatggtgtggttatttgtgtatatgtgttgggggttaattgggtgttagatttttggttgttattatggtggtagataggtagggattgtgtttttatgaattagttattttagaggagataaagttattaaaggatatggatttggagttaaatttatataaatagagtgtttgtggattagggttgtttttagaataaggtgagatagttgttttgttaggataaggtgtttatgggggtaagggtatgtgtttatttggagttgttatttttatgttttagattagttttgtttaatagaattttttgtgatggtgggtttgttttatatatttgtattttgttattttgtatggtagttgtttagttgtttgggtttattgtatatttaaagtataaatgtttatgtttattttatttatttatttatttgtatagaattatttatttattttaaatggatttttatttatatttatgtgtggttagtggttatgaaattgaatagttttagattatattggtatttgagattttagaattttagatttaaagtttgtttttgattttgagtttgtttttgtggggatagtatagatgttttttaagtttgttttttagaggtggatgtagtgtttgtggattgtgtattattaggtttggatagtggagagggtggttttttatagggagtgggagtggaggggatgttgtgtttatattgagtgtatgtgaggttttttgtagtataggatgggattgtatgtgggaagaggggggtgatgttttggttggaggtttttgggtagttgtatgatttagtgttgtggttaagaggggttttgtttattgtagttatgttgggtattaattattggatagtttagttgttgttgtgtttttggggagtttttttttggttttgtatttgatttgtttttttattttttttttttttattggttagtttttggtggaatgggtggggagggttttttagtttttgtgggggttgtattttgggaatttggtattttgggttgtatggatatagttttttttggtggttgtttttttttgtttagattggttggttttgtgttgttagtatttggtagttatgattatagtttagtttggaagtttaaggtataatttgttgaattttaaagttgtaagttggtgatttgggtttgtgtgggattgtttgttgatatatggggttttttttttgtgggtttttgtgggttttggtttgagatattttttttttatttttttggtttttttttttttttttgttttttttttgttaagattttggtttaggtaggagtttatttttagatgttttagtatttttggtttttttatttgatattttttagatgattgtttgttattttatttttttagtttagtttttttgtagatttatatttggttaattttttatgtttgggatttttgttttttttagaaggatgaaggttttttttgaggttgtgtttgggattgggttagggatgatatttttggtaaaagtttaaatgatattatgattaatgttttggttagtttatatattttttttttttttaaaaaaaaaatggaatttttagagttataaaataaaaatgtaaagaataaggtaataaaatatttgtgtatttattattttgtttaagaagtgagatattgtaggtgtagttgtagttttgggtgattttttttattttagttttatttttgttgtggtgtttgtttttttggattgggatttggttttgggtaggtatatttgtgttgggtagtggtgtgtttgagaagtttaggtttttttttttttttttttgagatagagttttgttttattgtttaggttggagtgtagtggtattattttggtttattgtaatttttgttttttgggtttaagtgatttttttgttttagtttttttagtagttaggattataggtatttgttattatgtttggttaattttttttgtatttttagtagatatagggttttattatgttggttaggttggttttatatttttgattttaggtgatttatttgttttggttttttaaagtgttgggattataggtgtgagttattgtatttggtttggtttttttttgtatatggttattagtattgtgtgattgagtagtttaggtttgtttttttttgaatgttgttattagtattatatttttggtgttttattggagttagtggttgttttgtttgtgtttataatgtgatggtgtggagatttatttgtgtagatttatgaagttttggtttatttattttggtagttagtgagtgtttttttgtgtggggaggtagagtttgtttgttttgtggtttattggtgatattgttgaaggttttttttgttattagtgttgttgggaatgtgtgtttttttaggtggatttggttgggttgtggagatgtgttttttagtttttttagatgttattattatgtttttttgagtggttttttggtaggtttttttatgtttgtttattttttgtgttttaggtagttgtttttttgattgagtgtttagtggatttttgttttgttttttatggtgtatggagtattttattttagtggtgtttgagtttttttttttttggtttttagattttggttgggatttttggagttaatttttttgtttgatattttgtgttgttaggttttgtttttttattttttaatatttttggggtgtgtggttttttttttagtgtttttattattttttttgttttaggttgaattgtgttttttataaatttatgtttattaaaaattttagaatgtgatttgggagttggagatggggtttttgtagatgtaagtagttaaggattttgagatgaggttattttggattagggtgggttttaaatttaataattggtgtttttaaaagaagtagagaggttatagatatattggggagagttatgtgaaggtaggagtagatgatggagtgatgtagttttaggttagggagtgtttgggaagaggtaaggaaggattttttttttattttattttagagtttttttagggagtgtggttttgttgatattttgattttggatttttggtttttagtatgggagagaatttgtttttatttttttaagttttatagttgtggtttattatggtagttataggatattgatgtattttttatttggttgttgtggatggatgattttgtttgtaggaagttttttttaagtattgtaggtgtttttgtttttataggggatgtttgtataagtaggtgtgaaaaaagggttttgtgggggtaaggtttgggttggtgtttgttgtttttttttattttatgttagtttttatgttttttttggtaggagtgtttggttttatttggtgaattagagttaaatttttttgataattggttgttatttatttaattgttattatttttaggagatagaaaatgttagaagggtggggtttgtgtagtgtttttttgttatttttttagggtattgtgttatgttgttttaatgtatagagtagttgtttaaagtgtgttggatgaataggtgttttatgtttagttatgtagataaaagtgtgttatgtggagggagttggttgtggaagagattattagtattttggttgtttgaggattttgtttttgggtttttgtaggtatttttagtttattatttttttttttatttatagttatttattttttttttatttttttgatattagttttgttatttatttaggtttgtaagtaggaaattttagagttgattttgatttttgtttttttagtatttttaggttttaataggttgttaagattttattaatttgttttttgtatattgatttttggataggttgttttggttatggttatgttttggttgggtttttattatttttttttggattagtaggtgttattttttttatttttgttttgttgtggtttttttttttttatggttaatatttagaggatgattattatttttttttttgtgtgttggggattgggtgataggatttttttatttgattatttttattagatttgggttgggtttttttatttatagagtttttagtttttgtttttaaagttttgagggtggatttgtgttgttgtttagtttggttttgatattgttttttagtttggagttttttgtttttgtgtttttggttttgagtgtttgggttttttttggatgggttgttatttgttttttggaaagtagggtttttatgtttttggattttttagttgatttagtgattttgggttattttgttatattttttttattagtttggttttggttatttttgtgttttttatagttttggattagagttatggtgggatgtttttttggtgtgtggtaggtagttaggaaatattgttggattgattttgataggagatgtttgggagaattgtttaaaaaattagtttaaaatgtaaatattggtttttttttgtgttggttaaagagtagtatttttttgtttgttttttgggtaagaaattgatggtgaatgtaatgtttttagggaggagaagaaggtgataaaaagggtttgtataatggggtatatgttaggtatttgtgattatttaagtttaaattataatataaatgtgaaattttttgttttggtagtttttttatattgtaagtgtttattgttatatgtggttgttatattgattatggtagatatagaatattgatattattgtggagagttttatgggggggtgttggtttagattatttttatgttggatttataaatttattgtttatttagtgaatggttattgggtatttattgagtaagtaggatgaaagatatttgtttttgggggagttttttgttggttgtagagaagtttaaatttaggggatttggggtaaattttgtaagggtttttggtttttgtatttttagattttttttgttttgtaggggtagttgggggttttttttaggaatggagtgttagttttagtttttgttaggttatagtttagatggttggttgagtatgagtatgtgagagtggaattgggtttaattgggttgtttttttttgttgttttggtttttttttatgttgatttggaaggatttttaaagtaataggtttgtttaggtggtttgtattagtaaattttgtagtggttttaagggtagagatagttggattgtatttatttaggaatagttaaagtttgaggtataataaaaagtggagaaagattttagagaggaatgtagttggttttagtttgggaatttgttttgtttgggaggttgtaggtgggttaggttggggttagtttggagggttttggttggttttgttggtaggtatagtagtagggttagtaggagggagtttaggatggagtttttttatttttaatttagggaagtaaattttagtggttgagtttgaggatgagtaggaaatgaatggaaaagtttttttttttttttttttttttttaggtagggtttttttttgttttttaggttggagtgtagtggtataattatagtttattgtagttttaatttgttaggtttaagggatttttttgttttagttttttaagtagttgggattatagttgtgtgttattatgattggttaatttttaaaagaaatgtttttaggttaggtatggtgatttatgtttgtaattttagtatttttggagttgaggtgggaggattatttgagtttaggtgttttagattagtttgggtaatatgatgagattttgttttgattaaaaatataaaaagttagttgggtgtggtggtatagttttgtagttttagttatttgggaagttgaggttgtagtgagttgtgattatgttattgttttttagtttgggtaaagggagtaaggttttgttttaaaaaaaaaaattttttttttttttgaggtggagttttgttttgttgtttaggttggagtgtagtggtatgattttggtttattgtaatttttgttttttaggtttaagtgatttttttgttttagttttttaagtagttgggattataggtatgagttattgtgtttggattttttttttttttttttttttttgtagagatgggatttttttatgttgtttaggttggttttgaatttttggttttaagtgatttttttattttggttttttaaagtgttggaattataggtgtgagttattatatttagtaggaaaagttattttttaaagtgagaggttgtgtgttttttatagtttggtgtttattagtatggaggatttattggaatgtgtgttaggtgaggggatatggaagatggtagtaaatttgagtttagagtattagaaagtatgtttttagttaaagatgtgttttttttatttttgtgtagtatttttttttagtgtgtatttttggagtaaggtggggttgattttatgaagatttttttttgaaggtttttgttgtttatattagtgttatttggattgtttgtttttttttttggatggttggattagttttagggttttttggtttggtgtggggagtatagtttattttggggaatgtttggtatgtgttttttttttattgggtattaggggatgaagttgtgttttgtggaaggggatagaggtgttggtgtttaggatggtgtatttggggtggttgaattggatttggtttttattgggtttttgtggagtttagattgttgtgagaaggggtggggaaaggtaggtgatttgtattttttatttttgttttatatgggaataggggtttattttgtatatatatttagtttggagtatgaatttttatgaagaggaaaatttttattaggttttgatgttaggattgtttgtgagggttgggttgtgttttggggtaaggataggagtggagggggtaattagggaaggttttttaatggaggaggtatttgatagtattttgaaaaagaagtagtttttaggttaagttagagattgaagaatgattatttaattttttttttttttttttgagatggaattttgtgttgttgtttaggttggagtgtagtggtgtgatttaggtttattgtaatttttattttttaggtttaagtaatttttttgttttagttttttgaatagttgggattataggtatgtgttattatgtttagttaatttttgtatttttagtagagatggggttttattatgttggttaggttggtttggaatttttgattttgtgatttatttgttttggttttttaaagtgttgggattataggtatgagttattgtatttggttatgattatttaatttttttttataagatgttttttggttgatgtaaagtaggttgagtgagtgtgatattttttttttgtttgtgggttttggtttttttagagtttggttagtgttattggagataaagtggtttttgttttttttttttgttttgttaggtttagtttgtgttgttgagttttattttgtaattaagaggagttgtgaattagtgatgttgatgttgtagaaaagtggttaggggtttatggggggtgaaggatagggatgttgttttgagaattgtttggaaggggtttttgggtaatagtgtttattttagggtgtgggtaggttggggtggttgggagttgggtttataggttggtataattagagttttttaaagttgtgggtttgagggttttgtttttttgggatagtaatttttggtttaatttgggaaaaggtgggttaaattaagtttggtttttttattgtaggattatttagtgtgtttagtatgtaaatgtgtttttgaatttaagataggattatagaaatttttttagtgtttttttggagggagggattgtgggggatttattgtaggggtttgggtttgtattggtttggtgaagtgtttttttagtgtttatattatgtgtggtgagaggttggtttttgttttttttattttttgttggttttattttattatttttgtatttgttttttagttggtttatgattaatttttgtttttttagagttaattggtgttgttaggttttttattttaagtgattttttgtttgggttaaaatgtttggatttttaggtatggaggggagatggattttaggttaaattatgttgggtaaaattgagggttaaggttgtgtttagtaagtgttttagttttggttgttaaatttatagtgtgtatagtgtgtaggaggtggttgggtgaatgaatttagttatagtttggttttttatttggggttgtttttaagtttttattgttagttaggttgggttagagttttgtggggtttttttgggtttttttgttttatagtaggagtttgtatggagagttttgagtgaggttaatgggtttttttttttttttttttttttttttttaatttgagatagggttttattttttttatttagttagggtgtagtagtgtaattatagtttatagtagttttgaatttttggttttaagtaatttttttgttgtagttttttaaagtgttgagattataggtatgtgttattttgtttagttggggtttttgttttttatttttttttttgtttttaaatttaatataaagaaagatattatatttataattagaaaaattaataaggaatattattttaaaattggaaaagggattaaagaaataaattaagaaatttttgtgatttttgtttattggagttagtggttgttagtggttggtttaatataatgttttaggaagaaatagaataatagaaagtaattttagtgagttgagttttggttttgtttgtggtgttgtattagttttttgtagttgttgtaatgagtggttataagttggttgggttataataatgtttagttatttttttatagttttgtaggttatatatttgagattagggttattaggttgaaattagggtgtttattgggtatagttttttggaggttttagggtaggggtttttagttttgtgtgttttattaggaattggtttgtatagtaggaggtgagtgattggtaagtgagtgaagttttatttgtatttatagttattttttattgtttgtattattgtttaagttttgttttttgtttgattagttatggtattggatttttataggagagtgaattgtattgtgaatggtatatgtgagggatttaggttgtgtgttttttatgagaatttgatgtttgatgatttgttattgttttttattattattagatgggattgtttggttgtaggaaaataagtttagggttttaattgattttatattatggtgagttgtataattattttattatatattataataataatagaaataaagtgtataattaatataatgtgtttgtggttgggtgtagtggtttatatttgtaattttagagtgaaattttgttttaaaaaataaaaaataaaggttaggtatagtggtttatgtttgtaattttagtattttgggaggttaaggttggtggattatgaggttaggagtttaagattagtttggttaatatggtgaaattttgtttttattaaaaatataaaaattagttggatatggtggtaggtgtttgtagttttagttttttgggaggttgaggtagaagaattgtttgaatttaggtggtggaggttgtagtgaattgagatagtgttattgtattttagtttgggtggtagagtgagattttgttttaataaaataaaataaaataaaataataaatataatatatttgaattattttaaaattatttttttattttttggtttgtggaaaaattgttttttttgaaattgattttaggtgttaaaaaggttgggggttattgtttttattgtttgtttttttgagtttttggtggttgtgggtgttttttggtttgtggttgtatggtttttatttttaatattagtatttatagatttttttgggttttatttttatttggttatttttgtttgtgttaaatttttttttgtttttgttttgtatgagtattgagattgtttttagggattatttagattatttagggtgtttttgttatagtaagatttgtaattgaattatagatgtaaaaatttttgttttaaataaggttttatttgtaggtttagggattaggatatgttatttttggggttattatttagtttttttttgtgattatgatttttttttttttttttagttttttattttggttgagatgttgtttttattttttttattgtttggttgtttgtggggttgttttttaggttttttgggaggaggtggttgtttgatgttttttagaaggttgggaatggttttttttattttttaggaagatgttttttttgttaaggagattgtatttggggttttattttaggtagagagtggatgggattgtggtttgaagtggtattttagggtttttggttttgttatttagttgagggttgtgtatgggttttatttggttataggtaatttatttggttttgtggggtagggattgtaaatttagaggtttgtggggtgtgttgaggtagaggggtgtaaatattgtaaatttgttgggggttttggggagtagtatagattgaaaagtgttttgtttgaagagtagaattgttttatattagttttgtgtggttaggtaggaaggtttttgtggtgtggttatgtgtttttttttttttaatagaagttgatagtttggagtttttagagagattgtttgagtttttagttttggtataaatatatattttttttaaataggtttgggttaatagaattagtttttgtgttttgggtttgaatgaatttttgaggtgaagtttaaagatagagaggatgtttttgatttttattttagggatttatattgtaaatttttatttgttttgttgagtttttggttttagtatggattttgattatgtgttggtggggattttttaggtaagtaagtagtttttgaggattttggatgaatagtggggaatagtattgattttttagtggggttttgagtttttggagaggaagatttgtttttttttaggggatggttagagatttattgatttatgtgtgtgtggtaggaattttttaggaagtttttgttttgtttgttttttttgtttgggtggggatggtaattgtttttgttattgtagattaatgggatggaggggggtgattttttagggttttttttgggtaggtgttttggaatttttttttagtatgttggtttggggtatggttgttttttttgtttagttatgttggggtatagggtgaagaagggttggggttagtttaggatagaggaaggtgaggtaggtatgtaggaattgggttttttaaatttttaagtttaaggaaattgtagtattgtgggatagggaaaatgaaagattttggaagttgttaggaatttgattttgtgagttggtttttaagagtttaagttaagtatttttaagtggatattaaaaaggagtagtaagttttggggtggtgggggttggaggaggtggagagaggaggttgttggaagttgtatttgggatttttgtagttattgattagattgggtggttgggattttgggatttttgtaggtagatttggtggtttgttggattttttggggtttattttgggtttttttttttgttttttatttttggattttttttttttgttttttttttttttttgttttgaagagataatgttattttagtttggagtataaatatatgattagtatatggaaatgtggtaatttggatgtatttgtgattgtaatagattgaagaaattagattagataaagagtgtttttagaggaggaggaggaggaggaggaggttgagagagggagggtgatgggggtgagaaaggggaggttgtttttgagtgggatgttgggatttttgttgttgttaaatatatttgtaggaatggagagggattggattttaggtatgtagatagttttttttttattggttgttttttattgttttggatttggggttttatttatgtttgggggaataagtatgtaaagggtgtttttgtttattttttatagaaatattttttttttttttgatggttttaagtttgtgggatgaattttgttttagaagttaagtttttttgagtttggtttttatttaaatttggttttttttttttttggttattttttttttattttttagtgtgttatttttgtatgttatggttattgttaatgttgaggttgttggtgttgaaattttgggagggtgtgggggatttgtttttttggtttgggtttggggtggtggtgtttggatttggttggtggttggtttgtttattgtgtggtttgttttttgtttttagttaaagtttgtttttaaggttgttttggttttttatttaaaatagtatttttgtgtttttttggtagttgattatagagggggaagtttttggtgtttagaggagtttggtgtgtgtgtgtatgtgtgtgtgtatgtgtgtgtgtgtgtttatttatgttggtagtttttttgttgtaggtatagatttattagggtgtgaataggtaaatgaagagaaagggggtttttttgtttttagtttattttagttttttaggtttttttttttaggtttagtttttttggtttttttatttatatgtggtgttgtggttgttattttatgtggttagtgttgttattggtaattagtagtgatgatagtttttgttgtttatgttgttttttgagtttagtgttgggagatatggggtggttgagttaagttttaggttttgggtattttgaagtgatttatgggttatggagtgggaggttgttaagagtgttaatttttatgtgttttgggttttggtttgttggttgttattatgtgtgtgttggggggtttttgagaggtttgagagagggaggtttattttggtggtttttttttaggatgtgtggttttttttattattgtttttagggttatatttttttttttttttttttttgagatggagtttggttttgttgtttaggttggagtgtagtggtgtgattttagtttattgtaagttttgtttttttagtttatgttatttttttgttttagttttttaagtagttgggattataggtgtttgttatatttttttgtatttttagtagagatggggttttattgtgttaattaggatggttttgattttttgattttgtgatttgtttgttttagttttttaaagtgttgggattataggtgtgagttatggtgtttggttttagggttatattttgattgttatgttgggattggtggagtgggtgtgtgttgtgttgttgagtatatttagttgggtatagtaggtggattttaggagggggttaggggagatggtagaaggtttgggtggtagtgaaattgtattttatttgtttgagtttgggggtttaggtttgttgggatgggtgggtgtggagtttagtgttttgttttttgtttagtaggagttgtagggtagggagtgttgagagggatttttgttaggtttgtatagtggagttgtttttggagtgattattttattaggtagtttgggtagattatagtgggttttttgttttttgggttattagttttaggaggatgttattttatttgtttggttggtaggggttttggggagttttgggtttggtttttattttatagatgatttagttgaggtttagatgggtgattagtaggggatttgagagttgagtagagaggtgtgggtttgggggtggtgttttttggggagttggaagtgatggtatttttttaggtttataaaatatgggttttttatgaattgaataaaatattttttgaaagtagttagtgttgtgttttagagattattttgatttttgttgtttttggttgaggatagtatagttagggatgaagtggggatttttttttgggttgtgttttgatgaaagatgttttttataaaattttatttggatgtgtttttatgtaagaaaatgtatatttttagaaatttagttgtaaattggttgttttttgaatgaatatgatagttttggagttgttttttttaatgaggtttttgttttgggtaaattttagtgttggtttttaattgttattgaatttttgtatagtttttggggaagtgattttttttttgtttttgttgggtggttttgagtaagttatttggtagttttgggttgtagttttgttatttgtaaggtgaggggtgggagtggtatggtttttaggtagtgtttttattttttgtgggtttttgtgtgtgttttgagttttgtgggtgtttttttttttattgaggggttttttttttttgtagggtatggtttatgttgtgttgttaggttgtaagttattgtgagagttgttttgatttttaagtatgttttggtttgaggaggagttatggggaggatgttgtgtttgtgtgatagaggtttgtttggtagatgttggtttgttgatttttagatgtggttgtgggtgttttatgttttattgggttggtgtgtgaggtgtgtttagtttaggttgttttatagttgtttaggaagggtttgtgggagggggtggttttattttggtgagtttatggtggtttgttagttttagggaaggtttaggagttttaagatttgtttttttgttttttttttggtagtgtttggttttggtttggtttgtgaatgggggtttgggtatttttttgttttttttgggggttgtggtttttttttgggaaggtgttggagggtttgttagtagggttggtatgagttatggagtggtgattggttgttgaggtatggaaggttattttttttagttaagggttggagttttttttttgttttggaatggttttgtggtttttataaattaagtagttttattttgttttaagagtttgtattttagtagggagagagtttttaagaagggaattttttattggggagttttgttgggttgggaggttaggaataggttatgagggagggttgtaggtaggggaagtggttgtttgtgtatggttatgaatgtaggtttggggttttggagggggtttggttatgttgttgttggatgtttgtttttattagggtttatttgatgtagtatggtatagggtaaagtttagttttttttatggggtttttgggttattagtgggtggggaattgaggttttttggagggtggtgttttagtttttattttttttttttgttttttgttgtgttgtttttgatggtttttgttattttttgggagtttttatttttggatgtttggtgtttgtttggttttaatttttttagttttgtttttttatttttgaggtgagaggtttggtttgatgtgttttgtatttgttttttgtttagttttgtgggaattttggtttttgtagtggttttttggggttgttattattaagtgttataaattgggtggtttaaaatattagatatttttttttttgttgttttggaggttagaagtttgaaattatggtattagtaggtttggttttttttggaggttttgagggggagtttgttttttgtttttggtagtttttggtggtttttgaaatttttggtgttttttggtttgtggttatattatttgatttttgtttttgttgttatggggtttttttttgtgttttaaatttttttttgtttgttttttatatggatagttttttttggatttagggtttattgggtaatttaaaatggttttattttaagatttttaattttataatgtttgtaaagattttttttttaaataggttatgtttataggttttggggtggatgtaaattttaggggttattttttatttttttgttgtttttgtgtgtttggatgtatagtatggttttatgttttagattttttgttggatttttttggttttttggggtggtttttggttttttttatttgtttttgtgtttttggtgaggtgttggggttgggtttagtttttgtaggaattttggggatagtatggagttggtaattttttattaggtgtttttttatttgtttagagtttatggttgtgaggggtttttttttgtggttttgatttgtaattttttagtggttagtgatgttgagtatttttttgtgtttattgtttatttgtatatatttttgtagaaatgtttgtttaagttttttatttgtgtttgatttggatgattgttgttgttgagtgttaggagatttgtagattaatatttagatattaattttatatttgatttatgatttgttgttattttatggattgttttttttttatgttgttagtgttttttgatatgtaatttttttttttttttttgagatggagtttgattttgttgtttaggttggagtgtagtggtatgattttggtttattgtaatttttgtttttttggttttagtgatttttttgttttagttttttgagtagttgggattataggtatttgttattatatttagttaatttttgtatttttagtagagatggggttttattgtgttgattaagttggttttgaatttttgattttaagtaatttatttgttttggttttttaaagtgttggagttataggtgtgagttattgtatttaggttgatatgtaaatattttaaatttttatgatgttttattttatttatttgtttttttgttgtttgtgtttttggtgttatatttaagaaattattgttaaatgtaatgttaggaagttttttttttgtgtttttttttaagagttttgtggttttagtttttgagtttaggtttttgatgtaagttgagttgatttttgtatgtggtgtaagggttggtttagttttatgttttgggtttttgatttattttttttttttttttatgtttagttggttttgttgggtggtggggaggagtggggaagttttgggttgggtttgtatttgattatttttttttaggttagttagggagttttagtttttgtttaggatttggttggatgtgttttttattgggaaagtttgggttgtttttttaggttgatggtagggttagtttggggtgttttgaggtttgttttgtggatatgttttttgttttaggtggtgtggttgtttggtttgtgtgtgagattagttgtttgtgttttaggttatggaggttgagtgtttttagtttgtttttttgtttggttttttttttggggaagtttttgtagtttattttttgtttttgtttttgttatttgtgtttttgtttgttttttgtttggaggtggttatttttggggttattttttatgatttggatataagtttttattttgaagttattatttaaatttttgtgttttaaattttttttatttattatatgggtttttattgtgattaatttagtagttgatgaagttttttttggggtttttttagtaatggggagttggtttttttggaggtttggtttttttttaagtggaagtggggtgtgagggtgttagtttttttttgttgtttggtgttttaggttggtttgttatttttggaagtatttgttatttttatatagtattttatatttatttttttgttttttatttttttttttaaggggttatttttgtttttttttttatttaattttatttatgtggtttgtttagtaatttttgatttttaatatgataaaataaattttttttgttggttatttatttatttatttagtattgggtgttttttgtggatttggtgttggggttttgtggaggataaagttagatatagtttttgtttttatgggattgtataagtgtaagattatattagtaaatgtgaaatataggaagtgataggtgtgataaaggggattagtggtaggatagaatttgtggtttgtaggattaggttaggagggttgttttggggggatatttttgggttgagtgtagaaggatgaggggagtaaattaggtttaaatttagtaggtagaggtgattgttgtaggtaattggtaatgtgtttaaaggttttggggtgtggggggttgaggttggtagtatggtaggaagtaagattggggttgaaagagattgattgttatgttgtgaaatatatatttggtttttatttttattttttggtatataatttttaaaatttttggaatttttaaagtgatgtttttttggatgtttatgattgatagattagttggtagttttaggatggtttttagggaagattaggtagaattataaggtttagtattattttgtaatttttaggtaggggagaggggttgaaggttaagtagattattagtggttaatgattgaattaattatgtttttgtaatgaggtttttgtgaatatttagaaggatggggttttgggagtttttggatggatgagtatgtggaggtttttggagggtggagtgtttggggagtatatggaagttttgtgttttttttttatattttgttttatatatttttttttttgtattttttgtaatattttttataataaattagtaaattttatgagttttaggaatatgtgtaaaagaaaaaaaaaagaataaattatagttgttgtagtaagttaattttattagtattggtttttatttgttgattttatttttggtaatgttttttttttttgggtttttgggatttttttggttttattattttttttgtagtggttttgttggttgttgtttttaggttagtttatttttatttggtttgtttttattaggggttgaggtttttttgtttattttagttttttggtttgttttttgttttgggtatttttttattttgaatggttagagtttttgaagttgtttgttgtgtgtttttgtttggttttatgtattttgtatggtgttttttagggttttttattggtaagggtattggtatagattttggggttgttttggtttaagtttattttgatttggagtttgagggtttttgagggggttttgaaggttagggtaggtaaggttggtatgttttgggtagtgggggttgggtatgggaggggattgtgggtggggagattttttttaattagtggtttatgtttggagattgatttgggttttaggttatgttttgaaattgggatagagagtggtgtagattttagtttggagattttttttgtttgtggatgtttttatatttttatttgtggagttatttttttttttttttttttaaatggggaaattttgatttgaatattgaataaataatatatttttgaaattagtgaagaggtattggttttgaaattttgttatgaaagtttgaaaatgttttttggattgatttgttggaatagatgggtgtgatggggttgtggggttttaggtggtaggaggtgtttttgtgtttagggtattttgatgtttagagtttttttgtgtttagtgtgtttttgtatttagggtatttttatgtttagggtgtttttgtgtttagtgtgtttttgtatttagggtatttttatgtttagggtttttttgtgtttagggtgtttttgtatttagagtatttttatgtttagggtgtttttgtatttagggtgtttttgtttttagggtgttttgtgtttagggtgtttttgtgtttagtgtgtttttgtatttagggtgtttttatgtttagggtgtttttatgtttaggtattgtttttttttatttttttaatttttttttattaataggtgttagttgtgaaatgtttgttgtgtgtgttttttggttgagtttattttgtgtttttaagtttttgttagatataggtaggttgttttagtttttttggtaaatgttttgttgttgttgtttgatatggggttttattttgttatttaggttggagtgtagtggtgttattttgttttattgtaatttttgttttttaggtttaagtgatttttttgttttagttttttaaatagttgggatgataggtgtttgttattatgtttggttaatttttgtatttttagtagagatggggttttattatgttggttaggttggttttgattttttgattttaagtgatttatttagtttggttttttaaagtgttgggattataggtatgagttattgtgtttggtttgtttggtgaatgtttattgaggtttattatgtgtagttttttttttaggtgtttggtttgtaatgaggagtaataaagatatagttgttggttgtttgttatttaatagttggaattgagaggtagtttataaatgagtaaatttataggtggttttagatgaggattgtgaagaagttaagaataggttgttgggggtgtatatttgtgtgtgtggtgaggggattaatggaagttttttttgagtggtgatattgagttgaagttgtaatgattagaaggatttagttaggttaaaatttaagggaagagtaatttggtaaaggaaatagtaggtgtgaaggtttgaggttggagtttggggaaggtgggagtggttggagtgtgtttttagagatgggttatggtgatattaatgtgataggtagggttaggttgtgttgggttttggaggttttggtgagggtttgattttatttttattatggtgggattttagtgttttgtggttgttgagaatggttaggggtaggtagggaggtttgttagggaggaggttgttgtaggttttgtagttggagagggaggattaggatttttttagagaggaagttggagagggaggatttttttgattgttggatggatttatttgtttggttgtttttgttagtatttagtagaggttattggatgttgataggtggttggttttgtttagttttgtattgttttgtgttgttttggtggttgttggttttaggaggagtgtttttggtgtttgagtttagtggttttggttgtggtttggtatatttggttgtgggtgaggttaaggtggtttggattttgggaaggttgggtatttggtagttttaaggtaggagttggggtgttggaggaggaagtatgtttattttttgtttttttttgttttgtgggatgttgagtttttgggtagggatatggtgagttttggtgtgatgtatttaatatttgttggtgtttttatttttaagtaggaattttggtgtttggtgtttgaggattgttgtttattgttttattattttttaggtttttttttagtttttgatttggggtaaggtttagatatttagaatatttttggttggtttttggagttggggtgaggtagaattttttttttatatttatagtattagttaaggttttggggtttggatattatttttgggaggggtgagtaggataagtgaggtttttagatttggggtggttttggattggttaggtaggtgggtgggggttgtagtttatgtttttgttttaggtaatatagttgagttgtagtttttgttttatttttagttggggttttttgtgtttattttttgtttttttttttttttttggaatggggggtggatattttaagattagttttttagttattttttttgttttttgtttttttttttttgggatagatttttgtgattgttgggtgtttttgatgttttgttttttttgtgttttgtgttgtgggtgagagagggttttggggggattttttttttttggagtatttgttgttttgggtgtttttgggggtgggtttttattttatattgtggagttggtgtaggaaggaaggtgttgggagttagttttaatttatgtgttggttgtggtttttaaggtgtggatggtaggaggtggtgagatagggatttattgattatgggattgatatttttttatgttgatgtgggttttgagttataattttattagtttttgagttttggtgttgtttttggtgatggtgtggatttagttaggtttttgggtagttttttttggattttttttttgtttttttttgggtagtgtttttgtttatttggaaaggatgggtaggatttggagataatagggatttaaagaagttgggagtgggggtatttgtgtagtttattttgtagaatagataatttggttaaagtttaaagtttgttgttaggagttttgtttgttttttagagagtatatggtttgattattatggggattgggggagaggtataggtatgtttgtttggtagtagaagggaattttgggtttgggtttttttattttgtggtgttgtttttttttagagttgtattgttttttttattgtttttgtttggttttagtgtttatgtggtttgtggtttttagtttgggtttggttttttgtaatttattttgtttagttttatatagtttgtttttttagttgggaattggagtttatttggagttttaggtagtagatttgatgtagtgatgtagggttgttagttatgttagtaggttttgttgtttatagagggatgggtattgttgttgataataattaaagaattatggttttaggttgggtatagtggtttatatttgtaattttagaattttgggaggttgaggtaggagaattaattgaatttaggagttttagattaggttgggtaatatagtaaggttttgtttttataaaaaataaaaaataataataataataaaaattatagttttagaatgattgattttagtatgtttataaagttaagggtttttagtgttttgggtttatgttattgtgttagagggagagaggaagaggttggggtgatgggtattggggtttatgttttttttggaatgggtggttttggattgtgtttgtgtgatatgtttgttgagtgggggtggtgtttattgaggattggatgttgaggtgtgggtggggggaggttatgaagtattgggtattttttgtgtattagtgttttgagattgtagagaggggatttgtttagtttgggtagggaggtgggtggtagtgaggaaggggagaggaatttgggtgtagaaagttttttttttagtaggtggtgttgtaagtttttgagagtttagtttttgtggggtttgtatttttattgaatttgtgggtagaggttgtttgggtgtagtttttgttaattgtgattgtttattgtgggtgaggggaagtggagtgtagagaatgtattggagggtagatgattagtttttgtataggtatgggggtgtttttttttttgtataggtatggggggtttgagtttttggggtttttgttttaattgggtggggaaagggagggttggaagttgagttagggggaaagggggtggttttttgttattttttttattttattttttttatttttggttgataggttttaattttttttatatttttttaattttttgttgtaaaattttttaaatatagaaaagatgaaagagggttgagtgtggtggtttatgattgtaattttagtattttgggaggttgaggtaggaggattatttgagtttaggagtttaagattagtttgggtaatatagtgagattttatttttataaaggatataaaaaattagttaggtatggtggtgtaggtttggagttttagttatttggaaggttgaggtgagaggattgtttgaatttgggaggttgaggttgtagtgagttgggattgtgttaatgtattttagtttgggtgatagaataaaattttgttttaaaaataaaataaaataaaattataaaaaagaaattatgaaagattttaaagtaaatatttatgtatttattatttagattttatagtaattattttgttgtttgttttattataaatttttttggttattagtatttatgttggttttgatgtatttaaaataagttgtagaaattagtatataatattttgttaatattttagtttgtattttattaattagagtttggtatttgtttgtgattatttttgtttttttttgaagtaaaatgtatatattttgagatgtataggtgtgaaatgttttgttttttgaattttaataaaggtatttatgtgtattttagtttgattagaatatagaatattattattattttagtaagttttttatgtttttttaggtgtattatagtttttattttttttagggtaattataattgtgttttttttttattatgaaataattttgttagtttgagtgttttttagagttatttatgttgttgtaggtgttagtgatttgttttgttttattgttgagtaatgtttattgtgtgaatattttgtgggtttttagttatttttttgttgaaagatttttggttgtttttatttggaggtttttatgagtaaatttgttatgttggttttttttgtataagtttttttgtgtatatgggtgtttatttattttgtagaaatatttagagtaggtatagggtaggtatatatttagttttataagaaattgttagatttttttttaaagtggtttttttattttatatttttattagtaatggatatgagttttagttgttttatattttggttaatatttggtgttgttattttgtgaaattttagttattttggtgggtgtgtagtggtattattttattatggttttaatttgttttggtttgatgattaatgtggttgagtatatttttatgattggttttttatatattttttttttgtgaaatgtttttttaaatttgttgtttattttaaaattgggttgtttgatttttttttttggatattgattttttgttagatatgtgttttataaatattttattttagtttgtggtttgtttgtttattttttttttttttttaagaataaggttttgttgtattgtttaagtaggtttgaaatttttgggtttaagttgtttttttgtttttgtttttttaagagttggttttataggtatgagttattatgtttggtttgtttatttttttagtggtattttttaataagtaaaagtgtgttattttaatttttatgaagtttaatttaataaatttttttttttgtggttttttttttgtgttttttgtaagaaatttttgtttattttgttaaattgtaaagatatttatgtttttttttagaaggtttagagttatatagtttttatgaattaatttttgtatatggtgtgaggtagagggttagggtttattttgttgttgttttatgtgtttatttagttgttttaaattttatttttttttaaagtttttattttgtatttttttggtgatttatgaggttgtataattttttaagatttttgttggttatttatgtatttttttttgtaaaattatttgtttatgttttatttttttttaaaattatgttgttttaagattgagtgatttttgaagtttttattttataatgtttgaaagaatgaatattttgttttttagttataggtttttgttttttgttttgtagttgtatagtggggtaagatttgggttttgttttgttgttgttttgttgtttttttatttgattgtttttttatgggttttatttaaaaaaaaaattggttgggtatagtggtttatgtttgtaattttagtattttgggaggttgaggtgggtagattatgaggttaggagattaagattattttggttaatatggtgaaattttatttttattaaaaatataaaaaattagttgggtgtggtggtgggtgtttgtagttttagataattgggaggttgaggtaggaaaatggtgtgaatttgggaggtggagtttgtagtgagttgagattgtattattgtattttagtttaggtgatagagtaagattttgttttaaaaaaaaaaaaaaaaaaaaatgttgttttatatgttttttatatattttggatataagttttttattagatatatgtattataagtttttttttttatattgtttttttttttttggtttttttaatgatgttatttaatgagtaagagtattttgtttttataaagtttaatttattaattttttttagttttgatttatgatttttgtgatttatggaggaaatttttgtttatattaaggttaaaagaagtttttttattttttagaaattttatagttgtatattttatgattttttttattttttaattttttaaatttttatattttttaatttattatagttgttaggatgttgtatgatttattttaaattagtttttgtatttggtttgaggttagggttaatttttgtttttttatatttatatttagttttagtattgtttgttgaaaagatatattttattttattgaattatttgatatttttgttaaaaattattgattgtatatgtggttttatattagtatatgtatgtatatatatgtaggttttgtgttgattgtatgtgtggttttatattagtatatgtatgtatatatatattggttttatgttgattgtatatgtggttttgtattagtatatatatattagttttatattgattgtatatgtggttttgtattagtatatgtatatatatatatgtaggttttatgttgattgtatatgtggttttatattagtatatgtatatttatatatgtaggttttgtgttgattgtatatgtggttttgtattagtatatgtatatatatatatataggttttgtgttgattgtatatgtggttttgtattagtatatgtatatatatatatgtaggttttatgttgattgtatatgtggttttgtattagtatatgtatatatatatatataggttttgtgttgattgtatatgtggttttgtattagtatatgtatatatatatatgtaggttttatgttgattgtatatgtggttttgtattagtatatgtatatatatatatgtaggttttatgttgattgtatatgtagttttatattagtatatgtatatatatatatgtaggttttatgttgattgtatatgtagttttatattagtatatgtatatatatatatgtaggttttatgttgattgtatatgtggttttgtattagtatatgtatatatatatatgtaggttttatgttgattgtatatgtggttttgtattagtatatgtatatatatatatgtaggttttatgttgattgtatatgtggttttgtattagtatatgtatatatatatatgtaggttttatgttgattgtatatgtggttttgtattagtatatgtatatatatatatgtaggttttatgttgattgtatatatatatgtggttttgtattagtatatgtatatatatatatgtaggttttgtgttgattgtatatgtggttttgtattagtatatgtatatatatatatgtaggttttatgttgattgtatatgtggttttatattagtatatgtattgtatatatgtaggttttatgttgattgtatatgtggttttatattagtatatgtattgtatatatgtaggttttgtgttgagatattattgtgtttttttgatattttgtttatttttttgttgatgttatattttgattaatgtggttttatagtaagttttaatataaagttttttaaatatttaaaatattattttgaatattttaggttttttgagtttttttataaatttaagaagtagtttgttgatgtttataaaaatgtagtgtgaattttggttgagattgtgttgaatttgtagattaattaaggaagaattggtattttaataatattgagttttttgtatagatggtatatttttgttttaaaggtttttttgtattttttttatttttttattgaaaaaaaatttttatagaattatattgttttgtagtttttaagaaaaagattttgtatgttatttgttaaatttatttttaagaattttatttttggtattattttaagttgaaatagattttaaattttatttttaattatttgttgttagtatgtaaaaatataatagatttttgtatgtaaattttatattttatgattttttttaaagttatttattattttggtaatggttttgtaggttttttaggatttaaatatatagttttatttttttttgattttgatgttttgttttttttttttgttttattgtattggttagagttgttagtttagtattgaatagtagtgattagtggatatttttgtttgtgttaaatttataatgttaattttagatttgttatatatgatttttgttagattgaggaaatttttttttatttttaatttgttgaaattttttaatatgaatgggtatgattttagtaaatgttttttttgtatttatggaaatgattattgttttgttttttatttgtttaataggataaattataatgattgatttttgttttttgttttttttttttttttttttaaagaaatagagttttatttttgtttaggttgtagtatagtggtgttattgtagtttattgtagtttgaatttttggatttaagtaatttttttattttagttttttaagtagtagggattataggtatatgttattatgttaagttaatttttaatttttaaaattttttgtatagatggggttttattgtgttgtttaggttggtttgtaatttttgagtttaagtaatatttttatttttgttttttaaagtgttgagattataggtgtgagttattgtgtaggtttgattttttaatattgaattaattttgtatttttggaagaagtttaatttgtttatgagatattattttttttatatattgttaaatttgatttgtttagtttttaaggatttttgtgtgttgatttatgagggatattggtgtggtattttttttgtttgttagtttgttttggtaatgtttttgttagttttattttggttttataaaattagtttggaagtgtttttttttttttgttttttgtgtttttataaggttgatgttgttttttttttaaatgtttgatagaatttattaagaaaattgtttggatttagaattttttattaggaaaggtgattgtttgtttttaattataaatttaatttaatgtatagaaagagttatttaggtttttttatttttttttgttttatttttggtaagttgtattttgaaggaatttgttttttttaggtaagttgttgaatttatttatttaaagttgtttgtaatataagtatatttagggtttgtttttagattttggtaataaagtaaatattgtaataaagtatgttatataaattttttggttttttagtatatataaaagttatgtttaggttaggtatggtggtttatgtttgtaattttagttttttgggaggttaaggtgggtggattatttgaggttaggagtttgagaatagtttggttaatatggtgaaattttatttttattagaaatataaaaattagttgggtgtggtggtatatgtttgtagttttagttgtttgggaggttgaggtgggagaattgtttgaatttgggaggtggaggttgtggtgagttgagattatattattgtattttagattgggtgatagggtgagattttattttaaaaaaaaaagaaaaaagttatgtttatattatattatagtttattaaagtgtataagattattatgtttttttgttaaaaaatgttaataattatttgagtttttagtaagttataattttttttttggtagaaggtttgttttaatgttgatggttgttgattaggtggtggttgttgaaagttgaaggtagttgtggtagtagtttttttgttttttttttttttttttttttttttgagatagagttttgttttattgtttaggttggagtgtagtggtatgattttagtttattgtaatttttgttttttgggtttaagtaatttttttgttttagttttttgagtagttgggattataggtgtttgttattatgtttggttaatttttgtatttttagtagagatagggttttattttgttggttaggttggttttaaatttttgattttaggtgatttatttgttttggttttttaaagtgttgggattataggtgtgagttattgtatttggttggtagttttttaattgaagtttttgatatgggttgatttttttttttatgaaagatttttttgtggtatgtattatgtttgatagtattttatttataatagagttttttttaaaattagagttaatttttttaattttggttatggattgattaaataagttgatgtaatattttaaattttttgttgttattttaataatgtttatagtatttttgtttggagtagattttatttttaggaattattttgtttgtttatttataagaagtaattttttatttgtttaagtttgattatgggattgtagtaatttagttttatttttaggttttatttttaattttagttttttgttatttttattatatttgtagtgattttttttgttgaagttttaaattgtttatttatgagggttggaattaattttttttaaatttttgttaatgttgatattttaatttttttttgtgaattataagtgtttttaatggtatttagaatggggaattttttttagaaggtttttaatttattttgtttagatttattagaggaattattaattatggtagatattgttttataaaatatattttttaaataataagatttgaaaattaaatttattttttttttatgggttgtagaatgggtgttatattagtaggtatgaaaataatatttatttttatatatatttttgttagagtttttgggttataaggtgtattgttaatgagtaataatattttgaaaggattttttttttttgagtagtaggttttaatgatttttttttttttttgatggagttttgttgtgttatttagaatggaatgtggtggtatgattttggtttattgtaatttttgttttttgggtttaagtgatttttgtgttttagttttttgagtagttgggattataggtatatattattatgtttggttagtttttgtattttttgtagaaatagggttttattatgttggttaggttggttttgaatttttgattttaggtgatttatttgttttagttttttaaagtattgggattataggtatgagttattgtattgggttttatttgttttttttttgttgttgttttttaattgagatagagttttgttttgttgtttagattggagtgtagtagtgttattttagtttattgtagtttttgttttttaggtttaagtgatttttttgttttagttttttgagtagttgggattgtaggtgtgtattattatgtttggttaatttttgtatttttaatagagatgaggttttattattatgttggttaggttggttttgaatttttgaatttaggtgatttgtttgttttggttttttaaaatgttgggattatagttgtgagttattgtgtttggtttttttttgtttttttgtttttttttaaattgagatagagtttttttttgttgtttaggttggagtatagtggtatgattttggtttattgtaatttttgttttttgggtttaagtggtttttttgttttagttttttaagtagttggaattataggtgtgtgatattatgtttgaataatttttgtatttttagtagagatgtggttttattatgttggttaggttggttttgaatttttgattttaagtgatttttttgttttagtttttaaaagtgttgggattataggtgtgagttgttgtattaggttttaatgggtttttaatatttagtaaattatgttgtaaatagatgtgttgttaagtagggtttgttattttatttttgaagtatagatagaatagatttggtagaatttttaagggttttaggatttttggaatggttaatgagtattggttttaatttatggttaatagttgtgttagttttttatgagagttagtttgttttttgaagttttaaagataggtattgattttttttttttagttatgaaaattttagatgatatttttttttagtagaaggtgggatatttatgttgaaattttgttgtttagtgtagttatttttattagtgttttgagttagattttttgggtaatttgttgttgtttttttattagtatttgttgttttattttgtatttttatattatagagatggtttttttttttaaattttatgatttgatttttgttagttttaaattttttttttttagtttttttattttttttagtttttatattattgaagagagttagggttttgttttggattaggtttttgtttaagggaatgttgtggttgatttgattttttatttagattatttaaattttttttatattagtattaaggttgttttgttttttttttttttatgtgtgtattggaattgtatttttaattttttttaataatttttttttggtatttataatttggttagttatttggtataagagattttatttttgtttgttttggtttttgatatgttttttttatttagtttaattatttttagtttttgatttaaagtgagagatgggtgatttttttttttatttgaatatttagaggttattgtagggttattaattggtttaattttaatattgttgagttttagggaatagggatgtttgagtagagggagagagagtggggaatagttagttagtggagtagttagaatatataatgtttattgaataagtttattgttttatttggatgtggtttgttatgttttaaaaataattgtaataatggtattgaagattattgattattgggtgtggtggtttatgtttgtaattttagtattttgggaggttgaggtaggtggattatttgaggttaggagtttgagattagtttggttaatatggtgaaattttgtttttattaaaaatattaaaattagttaggtgtggtggtgggtgtttgtagttttagttattggggaagttggggtagaagagttgtttgaatttgggaggtggaggttgtagtgagttgagattatattattgtattttattgtattttagtttgggtaatagagtgagattttattttaaaaaaaaaaaaaaagggttgggtgtagtggtttatgtttgtaattttagtattttgggaggttgaggtgggtagattatgaggttaggggattgagattattttggttaatatgatgaaattttgtttttattaaagatatgaaaaaaatagttgggtgtggtggtgggtgtttgtagttttagttatttgggaggttgaggtaggagaatggtgtgaatttgggaggtggagtttgtagtgagttgagattgtgttgttgtattttagatagagtaagattttgttttaaaaaaaaaaaaataaagaaagaaaaaagaaaaaagagattatagattattatagtagatataataataatgaaaaagtttgaattattttaagaattattaaatttttatatagagatatagtgttaatatgttgttggaaaaatggtgttagtagatttatttgatgtagggttgttatgaatttttaatttgtaaaaagtgtagtatttgtgaagtataatgaaatgaggtgtgtttgtgttttttgttattgtaatgttggtaggatttgtaaggaaaatattttattttttttattgtgattttatgtttgttattttttttttattagtagtttggttaggaggttattaatttagatttttttaaagaattagtattggattttttttttttggtgtttatttttttgagtttttttgttatttttattatttttttttttgtatttgttttagtgtattagttagggtttagttaggaaataaaaattatattggtaatttgaatagtaatttgtaatataaagtgtttttaattgtaagaggtagttaattattaaagggattataaaggggtgatattgtgatataagaaagatgtatttgggttgggtttggtgtagtggtttatgtttgtaattttagtattttgggaggttgaggtaggtggattttttgagtttaggagtttgagattagtttgggtaatatggtgaaattttatgtttattaaaaatataaaaaattattttggtgtggtggtgtgtgtttgtggttttagttatttgggaggttgaggtgagaggatagtttgagtttgggaaggtagatgttgtggtgagttgagattgtattattgtattttagtttggatgatagagggagattttgttttaaaaattaatgtatttgtttgtttgtttgtttatttatttatttatttatttatttatttatttatttagtttttgttttttaattttgtttggtatgtagtttttaaaatttttgaaatttttaaagtgatgggtgtttttttgtttgttaaggaggtgattggtggttggaggtttttggatagtttggggataagggttggttgttaggggatttagttttgtgattagaaggttagaatttgtagttttttttatttattttttgtgaggtaagaggggatgaaggttgagttgattattaatggttaaagattttatgttatgtttatgtagtgaagtttttttgaaaatttaaaaggatgaggtttgtagagttttaggttgttgaatatttgtaggtgttgggagggtagtgtatttttttgtggaagttttatgttgttttttttatattttttttatgtattttttttagttggttgtttatttgtattttttgaaatattatttgtaataagttagtaattttaagtaaattgattttttgggttttgtgagttatttaagtaaattattgaatttgagaagggagttgtgaagattttaaatttgtagttaagttagatagaagttatgggtaatttggtgttttattatttgtgattgatttttgaagttgagggtagttttgtgagatggaatttttaatttatgggatttgtattaattttggttggtgttagaattgaattgaattgtaggatatttagttggggattgttgagtattggagaattgtttgggggttggtgggaggaaattatatatttggtgttagagttgaagtattgagtgttgtgaatgagagtggagagatagagtttgttttgttttatgtaagaggattttaaggagtatagaaagagtaaatatgagaagtagttattttagaagaaaatataggaggaaagttttgtgatattggagttggtaatgtttttttggatgtgatattgaaaatataataaaagaaataaatgataaattggattttattaaaatttaaaatttttgtgtattaaggaatattattaatggtgtgaaaaggaaatttatagaatggaagaaagtatttgaaaattgtatatttgataaaggattagtatttagaatatataaagaatttttataattaagttataaaataaaaaaaaataatttagtgaatagatatttttttatagaagatatattaatggttaagaagtataggaagagatgtgtagtgttattaattattagggaaatgaaaattaaagttataataaaatatgattttatattttttaaggtggttgttagttaaaatatggataatagtaagtgttggtaaggatatggagaaattggagttttgtgtattgttggtgggaatgtaaaatggtgtagttgttgtggaaaagatataataattgtttaaaaaattaaatttagaatgattataatatttagtgattttatttttagatgtatattttaaagaattgatagtagggatttgaataggtgtgttatatttttgtttgtagtagtattttttttataattaaaagatgtaggtaatttaggtgtttattagtggatgaatgaatagataaaatgtggtttatttgtatagtggaatattattttgttttaaaaaggaaggagaggttaggtgtggtggtttatgtttgtaattttagtgttttggaaggttgaggtgggtagattatttgaggttaggagtttgagattagtttggttagtatggtgaaattttgtttttgttaaaaatataaaaattagttaggtatgggggtatgtgtttgtaattttagttattagggaggttgaggtaggagaattgtttgaattagggaggtggaggttgtagtgagttgagattatgttattgtattttagtttgggtgatagagtaagattgttttaaaaaaaaaaaaaaaaaaaaaaaaaaaggagattttgatatatgttatagtatagatgagttttgaagatatgttaagtgatagaagttagatatgaaaagataaatattgtatgattttatttttatgaggtttttagagtagttaaatttagagagatagaaagtgggatggaggttgttagaggttgggggaagggagaatgaatgggaagttggtgtttaatggggatagaattgtagtttgggaagatgagatggatggtggtgatggttatataatagtgtgaatgtgttttatgttattaaattgtatatttgaaaatggttaaaatggtaaattttttgtgatggatattttaaggtatgtatgtaaatatatagaagtagttattattattggggttgatggaaaagaaattaagaatttggagtgttttttatattttgttatgttttatgtttaggttttgttggagagtgtgtgattgttatagaaatttgtagtttattggtaataaaaaggtttttgttagaaggtgtagaaagagtggatttgtaggattagtttattgggtagttgagaaatttattagagggtatgggtgggtaggagttgggtgtttgagaagtttgttgaggttttattgggttagagttggggtgttggagaaatttagtatagagtaggttttattgggtatatgttattggtagttgtgtttttagaggaaaaagagattttggaattaggaagagaagttgttattttagtaaggtttggtagttttttatagtgttgttttttgtggatagagtttgatatgattgtatttggttaaggagaaagatttataaggttttggtttagtattatggagtggggtttggtaggatgtatgtagagttaagaggtaatatatgggtaattggtatatttttttagattttttgttttttttgttgttttgttttgttttgttttgttttgttttgttttgagagagtattttgttttgttgtttaggttggagtgtagtggtatgatttaggtttattgtaatttttattttttgggtttaagttatttttttgttttagttttttaagtagttggagatgtttattatgtttagttaatttttgtatttttagtagagatagggttttattatgttggttaggttggttttgaatttttgattttaggtgatttatttgttttggttttttaaagtgttgggattataggtgtgagttatattgtatttggtttatttttttagatttttaaagtagatttttaggtttttttttttttttttttttttttttttttattttttttttaatataagtatttatagtttttttttaagtattagttttagtttatgtattttagtatgttgtgtttttattattattttatttgaaatattgtaaaattttttttgtgattttttttttgatttatgggttatttagaagtatgttgtttaatttgtaaatagttaaggtttttttgagtattttagagttattgatttttaatttaattttattttggttagataagtatattttgtatgtttttaaaatttgagatttatggtttagaatgtgtattttggtgaatgtattgtttttatttgagaaaaaaatatgtatatatattttagattttttgagtatagagttttataattgttgattaggttaattgttagttattagtgttttttagattatttgatgtttgttttttagatgttgagagaatggtgtttgttatggtttatttgtttgtgttttttaaaatttatatgttggagtttaatttttggtgtagtggtgttgggaattggggtattagggaagtattggtttatgagggtagagttattgtgaatgggattagttttttttgttatgtggggatatagtaggaaaaggatatttttgaagtagggagttagtttttattagatattgagtattttgattttggattttttagtttttagaattgtgagtattataatttgtttataaattatttagtttaaggtattttgttttaatattttgaatgaattgaggtggtgttaaaatttttaattatgtatttaggtgtagtggtttatatttgtaattttagtattttaggaggttaaggtgggtggattatttgaggttaggagtttgagattagtttggataatatggtgaaattttgtttttattaaaaatataaaaattagttgggtgtggtggtaggtttttgtaattttagttatttgggaggttgaggtaggagaattgtttgaatttaggaggtggaggttgtagtgagttgagattgtattattgtattttagtttgggtaataagagtgaaattttgttttaaaaaaaaaaaaaaagagtttttatttatgattgtggaattgtttatttttttttttaatttttttaggttttatattatgtattttgaagtttttttggttaggtgtatatatatttatgattataatggtgttttgatgaattgattatttaattatgatgaatgtatttttttattttgtaataattttattttggatttaattttattgatatttatgtagtttttttagtttttttaaatatgttgtttgggatgtataagaaggttggagaggtttatggagaaatttatgatggtttgatttatagttttttaattttattatggtgtgaatgtggtatgtatatagtagaaattgtattttaagtatgtgtgaaattattgtgttttttatttttagtatagtatttaataatttatatgagatagttaatattttattataaaataggttttgtgtttgttgattttgtttaattgtaggttgaagtaagtgttttaattatgttaaggtaggttaggttaagttagaatgtttggtaagttagatgtattaagtgtatttttgagatgatatttattttttatttatgatgggtttgttaagatataattttattattatttaagtagtattagtatgtttttttttaaatagaaaattttaatttgtgtttatattgaaatagtattttttgtagatagtatatagttgagttttgttattttatttattttgatagtttttgttttttaattggaatatttaggttatttttgtttaatatagttatagatatgattgggtttagagttattattttgttttttgatatttattttttttattttgtttttttggttttttttatgttaattaagtattttttagaattttattttaatttatgttttttttttttttttttttttaagatagagttttattttgttgtttaggttggagtgtaatagtatgattttggtttattgtaatttttgttttttgggtttaagtgatttttttgttttagtttttttagtatattgggattatagatgtttgttattatggttggttaatttttgtatttttagtaaagatggggttttattatgttggttaggttggttttgaatttttgattttaggtgatttgtttattttggttttttaaagtgttgggattataagtgtgagttattgagtttggtttgttttgattttttaattgtatttttttgtattgttattttagtagttattttatagattttattgtatatttttagttttttatagtttatttagaattaatattgtttttttttatggaaaaaaagtgtaagaattaggtaattttatgggtttatttattattttttattttgtatgtgatggttgttagatatttattatatttatatatattgtaaattagataatataataaggaaatttttgttttaaatagttttatgtattttaaagaaattaaaagtaaaatagaattttttttatttgtttatgtatttgttatattttgtgttttttatttttttttgaagagttgagtttttatttggttttattttttatgattttggagaatttgttttatggtttttgtagtgtaggtttgtagatagttaatttttttttatttttatttatttgtaaatttttattttgttgttattttttttttttttatttttatttttatttttgagatagagttttattttgtttttttataggttatagtgtaatggtgtgattttaaaatttttgtttaattttaatttattaattttttttttttgggtttaaatgatttttttgttttagttttttaagtagttgggattataggtatgtgttattatatttagttaatttttgtatttttagtagagatgggattttattatgatggttaggttggttttgaatttttgattttaagtgatttgtttgttttggttttttaaaatgttgggattataggtgtgagttattgtgtttagtttgttgttatttttgaattataattttattggttatagaattttgagttgttagtttttttttttaggattttaaaatatagggttttagtgtttttggtttttgttgtttttgttaaggaattagtatttatttagttatttttttgtagattatatgttgtttttttttggatgtttttaagattttttatttaagtttgattgtttagtatttatttttgggtaaaaaagtttttagaaattagaaatttatttagttttatttttttttgttaggtgtagattttattttagtttttatttatttgagatattttatattgattttaggttgttgttattttgtttttttaaatattttgtttagagttataatgttttttgtagaattgattagatagtagttattttttgtgattaggagttttgattttttagatttgttgatgggtttataaagtttttgtttgtggtttttagttggtagtggtttttttgttttgaagttgttatgagtgtgtaaaatttataggtttaattttttttattagtatagtttagaaaagtggaatttttggtttgggtggttatggtgttttagattattggttagattagggtggtgattgttagttggttgaatgtggggtttttagtttagtatttttggattttattttaggagttatggttgttttagggttaggggtttggttttagtttttgtttttttttttttttttttaagttgtttagtattaggttttaattagtattttttgtagatagggtgggttggttttttattagaggggtagggttgggtgggaagtttgttgagtttttttttttgtgtagtttatagttttggggttagttttagaggggtgtagaaaggagtttttaaaggtagaaatttatttttttttttgtttttgtgtttttagggataaaggagaggtggttttagttggggggttattagtggtatgtaggaggtttatatgattattgtttgttggggtttttttttttttgtgagagagatgagagagaggagagagagtgtgagttagggtagtgtttttttttagtaatgtagatttttgtatgtgttttttaggagaaattttgttatttgttagagttttagatttggaagaagttttgtttttttttttttttttagtgtagtgtgtgtgtgtgtgtgtgtgtgtgtgtttttatatgtattatatttttttatagaggaaataatttttgtttaagtgtaaaggttgggattggagtaggtagtatgtgggttaaaggagtagagaggaggaaatgggggtgggggtgagggtgggaataggaggtgggtagatgttatgaggtatgttttttataattagaagggttggtggagatgattagaatgttttagatagattttttattaaatttttaaaatttaattttgttttatgaagtttgaggattttgtagagtgaaagataaggaagggtttttttgtaggggggtgtgtgtgtttgtgtgtgtttgtgtgttgtgtgtttttatgtgtgtgtatgtgtggatttgtgtggtgtgtgtttgtatatgtgtgtatgtgtggatttgtgtggtgtgtgttgagtgtgtatatgtgtgtgtttgtgtgttgtgtatgtatttgtatatgtgtatatagattttattttttttttttttggtttattaagtgttagaaagaatttttgtgagtttttttattttttttaaggttgtatatggagggatttgtgtaggtatatgtgtgtgtgtatataatatatatatatatatatatatatatatatatatatatatatgagttaggggtgagtatttttgtggattgtatttaggtttggtaggaaattgggttttgggaaattgtaggttttatttttggtagaaaattatgtttttgttgttgtttgttgaagggaatattaagtggggttggggatagtttatgttgagaagagtaaattttgtttatggtattggggatattgagtggtttttgttttgggttttggagggtttgggagatatgtttgtagttttgggtattttttaaggttatgggtggttatatttaaggttaggtttttttttgtgtgagttgtggttagtaggaaggttgattttagaggtggttttagggtttttggaggttttgtttttgagatatgggttaaggttagagagttgagaaggttgttgttgaggattttggttggtgtttagtttagtggttttttaggtgggttttgtgtaggggttgatgaagttagttgggaaatttgtgaaataaagtataggttttttaggtttgtttagagttttggtattagatgaggtgtagagaagggaattgagttgttaagtgtgaataggagagaggagttttaggattatataggggttttgatatggtaggtgtttggttagtagtggtgttgtttttattgttggatgtgggaaaatgtattgatatttgttgattagagttggggtgagtatttgggtgattttgtagatgagataaaataagggttgttgtgggggaggggtttttgttgggttattttgttgaggttttgtgttattgttttgtggttgttataataaaggattataaatgaggtgatttaaaatatttgaaattggttatgtgtggtggtttatgtttgtaattttagtattttgggaggttgaggtggttggattatgaggttaggagattgagattattttggttaatatggtgaaattttgtttttattaaaaatataaaaaaaaaaaaaaaattagttgggtgtggtggtgggtgtttgtagttttagttgtttaggaggttgaggtaggagaatggtatgaattttggaggtggaggttgtagtgagttgagattgtgttattgtattttagtttgggtgatagagtaagattttgttttaaaaataaaaataaaaataaaaataaaaatatttgaaatgttttttttaaagtttttggagttagaaattttagattgaggtgtttgaaggtttattttttttgggggttttgagggagattgttttatgtttttttttgagttttgtggtggttagtaatttttggtattttttggtttgtagtttggtttattttttatttggtttttattttgtgtttttttttgtgtttttgtttaaattgttttttttgttgtttttttaatttatttttagggataggtttttattttgttttttaggttggagtgtagtggtgtgattatggtttattgtagttttagttttttaggtttaagtaatttttttattttagttttttaagtagttgggatataggtgtatgttattatgtttggttaattttttaatttttttgtagagatgagggtttaggttggttttaaatttttgtgtttaggtaatgagattttgttttttaaaatattgggattagagatatgagttgttgtgtttagtttatttttgttttataaagatatttgttattggatttagggtttattttgatttaatatgtttttaaataatttaattatatttttaaagattttatgtttatataaagttatatttataggtattggggggttaggatttgtatatgttttttgggggaatataatttaatttataatgggttttatttatagaatgaatggtttttttagggtgtgtgtaggtgggtgaggggtttaggagagggatttgtgtggtaagagggtttgtgtttatgttagagattttagaaggagattggatggggtggttgtatggagtaaggggttatagttattgtttttaagtagttggtgggttgtttggtagaaagggagtatttattttgagtttttttaagatatgaagttagtattaggtatttggaaggtgttagtgagtagagtttgattttttatagaaagaggtgttttttttataatgtttatttgaggatggtggaataggttattttataaggtagtgagttttttatgtttggaagtatttaagtaggggttatgtgggagttgtttaggagtgtatagaagggattttagaggtttttgttaatattatttttgtttgttttattttatgataatttgaattttagaatgtaatgttattggggatatgtttattagaggggtttttagtattaggttttatatattatgtattatttttagggtagggaatgagagtaggttttattttttttggttgtttgtgaggattaggaggtttgttgttgaggtagttttttgtggaaatagtgttttagttttgtaatttatttattggagttttaatattttaatgaaatattgtgttagatgggttttgggtatgtgtgtgtagattgttataagtttatgagaatgtatatatgtatattgtatgtgtgtgtatatatgtatgtatatatgtataagaatatgaagatttgaggtaggtatagtttgtgagatagatttttttaggttgaaagattttttataagggtttttagaataaggttttagttttggtagttttttttatttttggtgggaggatttttatagagaagaagggttaagaagtatagtttttgatgtttatggtgtattaagttttgttttaagtttgtgttttattttttatttatttagtaaatttgttgtttttgttttgtgttagatgttgtttttagtattttataaatattgatgtatgtttgttttatgataattttgtgaagtaggtagtgttattttgttttatagatgaggaaataggtgtagagggataaagggatttgtttaaggtttgtttttattttatatgtatatgaatgtttatttatgtggtaggtgttagtttttttttgatgtgagttaggttttgagttggttggggtttgggttttattttggttgtgttttgttgtgggtattaaggaagtttttagtagttttatttttttggtatgatttagttttagggattggatttttttaaatgtttttgtttagtttggagttttttttttagttgggggagggttgaatgattttttatttttggaggttgttggagttttttttgtttgtatgtggttgttgttgggtggataggtttgtttgtgggttgaggtttttagtagttggggtggattatttttttttttaagaagttttgggagaagtagttgagggggttagtgtttttttgaggttaattttttgttttttttagtgtaggtgtgaagttatttttgtttgtgtgtttgttatagatagtggagggtggtgtaattgtgatgtttgtttgttgtattttgtgtttttgaggatgttgatttttggttggtgttgggtgtttgttttttagttattttgttttgatttggtgtggtaggtttgagtattgtttttttataaggaaataggtttagaggttttgagttatttgtttgggtttttttagttaataattggttgagttaggatttttatttagttttgtgattttagaagtttaagttttttttattatgttagggttaggaaaggattagaatgtttttttatgtgttgattatttggatgatttgtgtagtttagtttgttgtagttgtttaataaaaatgtggaatgaatgggtttatatgttttattgtgtgatttagagttaatgattttggttgatttttttgtttttattttgtggtttagtatttttttttggggtgtgtgattttggaagtagtgattttttttattttattttgaatggtgtttgtgttgtagtaggggagtagttggggattgttagtgtttgttgttggtgggttgtgtgttagattttgttttggatgtgtgggtgattgttagttatatgtgtgtgaagggttgtgtgtgtaggatttgtgtaaatgtgtttttttttgttgttagtttatgggaggttgttaagattttgtttttgtatattagtttatattttttttgtggtttattgttgtggttgtttttttgtgttatgtggttgtaggtatagtttttaagtggatggggattgtgggttgaatgtgtattagatgtttttgttttttggtgggtggagatttttaatttatgtattgtggttgttgtatttgaaaggttttttatggtgaaggatttggatttgagtaattttttgtagaggttttagaagtgttttttggttgggtgtggtggtttatatttgtaattttagtattttgggaggttgaggtgggtggattataaggttaggagattgagattattttggttaatatggtgaaattttgtttttattaaaaatataaaaaattagttgggtgtggtggtgggtgtttgtagttttagttatttgggaggttgaggtaggagaatggtgtgaatttaggaggtggagtttgtagtgagttgagattgtgttattgtattttagtttgggtgatagagtgagattttgttttaaaaaaaaaaaaaaaatgaagtgtttttagtttttttttttgtggtgaggttttgagtttttatttttagaagaaaatttggttggggagggtatttttagatttggatataaatgttaggagattagggttgtttttttaggtgattaattatagagatttagggaaagttatgtttggaagaggtgatattgtgttttagttttatttatttttttattttatagatattgtttggtgtttagtttgtattgtgaggttttttaagtagttttgggtattgtgtatttggtatggtttttagttttatttttttgttttgggagatttggtggggattttgggttgagtttttgtggttgtggaattttggtggtttattgtggtggttgagaatagggatgtggggttggatgggttgagtgtaatttttagtggttttgtgaattgtttgggagttttgggtagtttttttttattttgtgtttttgttttttgatggaaaaatgggggttaggggggagtgattttgaaggtatttgtgggaattaagtgaggtgataaatgtagtgtttttggtagagaattggatatagagtttatttttatgaagggggttgttttttttttttttatgtttttttttgtttttatttttttttttgtattttttttttttgtttttttttttttttttttttttttttatatgtaggtatattttatttggtgttttaattgtttttttttattgtttttttgtaagtggttttttaagtgggaatttaggtttggaaagggtgggtattttgtttggtgggttttggtaggttaggtgttgagtagttttaggagatataattttaggaaaaggtttatgtaggttggttgttatgatggattgttggtgggagaggggaaggtgttgtggtaggggaagttttggaaatatttattagtggttttatttatgatttaggatatttgttaggttattagaatatagttgaggaagttgttggttagatgtttagaagtattaatttggtggttgggttgtggggggatttttttggataggtagataaggtgttggaggaaggggttgatatttatttagtgtttgttatgtattgagggtataaagggtaggatggagagttggtttatgttatttgtggaattttttaggtgtgggggtagatggggaagtaagggggtttgaagatatatgtgtttattaaatgtttttaaattttaagaagaagaataaggatatatttataggggtagggttgaaagtttgatgtatggtgttttggggtttgtttttgttgtaatagttatagtggtttttttttattttttttttttttttattttgttgtgaaaatgtttaaaatatatggttaagttgaaagtattttatagggaatatatttagttattatttagattttattattaatattaagttatatttgttttattattttattgtttatttattttttttttgtttggttatgaatttattttatttttattttttggtgtattttaaagtaattttaggttattttgattatttttggaattattgttagaaatttttttttttttttttttttttttttttttttttttttttgagatgggattttgttaggttatttaggttgaagtgtggtggtgtagttatagtatattgtagtttttaatttttgagtttaagtaatttttttgttttagttttttgagtagttgggattgtaggtatttattattatatttagttttatttttaaaattttttattaattttttattttttgtatttatttaggattattttttataaagttagggtgttgtaggaggggttagaattttaagttttaattttggttttgttattaatattgtgtgatttttagtaaattattttgtttgtttaggttttgtttttatttttatgaaatgagggtgttaaattgtatgttataaataatgagggttattagttattaagtttttattttaggttaggtattttttatatgttattatgagtttttttaatttaggtattgtttttaatggatagtttagttaatggaagtttagagaggtggtgtaatttgttaaaagttttattatttagtgaatgtttttatggggtttgtatttaggagtttgatatagagtttaggttttagtatttggtgatgttttgggggtgtgagtagtttagtttattttgggtatgtgtttatttgttgttttttttgttttatgtttgtgtttgttttttttgaagtttagattgttattttttagttttaaatattaaaattggttaggtatggtggtttatgtttgtaattttagtattttgggagattaaggtgggtggattatttgaagttaggagtttaagattagtttggttaatatggtaaaattttatttttataaaaaatataaaaattagttagatatggtggtgtgtatttgtagttttagttatttaaggagaatttagttatttagttattgaggtatgagaattatttaaatttgggaggtggaggttgtagtgagttgagattgtattatttttttttaggttaggtaataagtgtgagattttgttttaaaaataataaataaataaaataaaataaaaattaaaattaaatgttaaaattaatttataaaataaattttggttaaagtagtttgtttattttgttttaattatgtatattgtattagattttgttaggggtttagtgtataaagatgagatttttgttttgttagataggtgggatgatggttatattttgagttagttaaggtattatttggttgtgtaataaaagttaaaatattagaggttgagtagtatttggatttatgttttagtttaagtgttagttgttatgggggtttaggatagtttggatttagtttatttttttggtgtatttttgatatatagtttttattttttgagttgagatggttttagtttttgttgttatgtttgtattttagttagagggaagggaagaagggagaggggaaagggtaagtgtttttttttatttttaagggtatgatttgaaagttaaatattttagtttttttttattggttagaatttagttgtatggttgtttttgttattagggaggttgagtaatgtattttttagttgggtttttttgtgtataattaaaattttagttattatagaaaaaagggagtttagatattggggaaataattagtatttgtattatatgtattgatagttttttttgtatgaatagagttgtggtaggttttatgttagggagaaagtaagattggaaaagagtttattaaggaggtggtatttgtattgtgtttaaggggtaagaaaaatgttttttaattaggagttataaatgtttggttgaagtgttattgtttttttattttggagttggaatagatgttattagttaattatgatggttgttgggtgtattggttaatatttataattttagtattttgtgaggttgagggtgggaagattgtttggggttaggagtttgagattagtttgggtaaattgtaagattttgtttttgtaaaaaaatataaaatgtagttgagtgtggtggtatttgtagatttagttttagttatttgagaggttgagatgggaggattgtttgggtttaggagtttgaggttgtagtgagttatgattgtattattgtattttagtttgggtgatagagtaggatttgtttttaaaaataataaaataaaattaaagttttaaaatggaaaaaaaattatgagtatataattttagatgtatttttaagatagtaaatttgggtgggtgtagtggtttatgtttgtaattttggtattttgggaggttaaggtgggtggattatttgaggttaggagtttgagattagtttggttaatagttttatttgtattataaatataaaattagttgggtatggtggtgggtatttgtgattttagttatttggaaggttgaggtaggagaattgtttgaatttaggaggtggaggttgtagtgagttaagattatattattgtattttagtttggagaaaaaaagtaaaattttgttttaaaaaaaaaaaaaaaaagtaaatttagggttaggtttgtagttatatggttatttttttttttgagtatggaggtagttttagaaatttgttttatattatattagtgggtagttgattgggttagtttgttagttgaattttatttgttatagttattttttatagtaaggggtattttagatatatttttttttttagggaagaataagttgtagttgtttgagtgttttatttagtggtgtgtatgtttttttttaattttgtgtttagtgatgttttgtttgtagtttgaaatttgttatagtgggtgtgtttatattataggaattggtaaatattatatattaggttttattttttgttttttattagggtaggttgttttttttttgttgtttttgttttttgtttttttttttttttgagatggagttttgttttgttgtttaggttggtgtggagtgatgtgatttttgtttattgtaagttttgtttttttggtttatattatttttttgtttgagtttttagaatagttgggattataggtgtttgttattatatttggttaattttttgtatttttagtagagatggggttttattgtgttagttaggatggttttgattttttgattttgtaatttgttttttttggttttttaaaatgttggtattatgttattgtgtttggtttagggtaggttgttagaaatgtattagtttgttagttttagttttgtttgttttttattttttttttttttttttttttttttgagatggggtttttttttgttgttttttaggttggagtgtagtggtgtgattttggtttattgtaatttttgttttttgggattaagtgatttttttgttttagttttttaagtagttgggattataggtgtttattattatgtttagttaaattttgtatttttagtagagatggggttttattatattggttaggttggtattgaattttttatttaaggtgatttatttgttttggttttttaaagtgttgggattataggtgtgagttattgtattgggttttttttgtttttttttaatgaaaatttttttgaaagatttgtttattgatgtttgtgttaataggtattgtttgtgggatagagtttgttttttttttgaaggtttttttttgtttgggtgattatttgtatgttattttttgttgtttagaattaaagatgtagttatgtttggggtaggttgggaaaatttgtgggaattatagagtttgttgttatgttgtgttttggatatttgaagtttggtaggtaggtgggattgagggtgggtattaggaaagtgatgtggttttataggaaggggatataggttttgagattttaggtttttaattggataaagttgttttttttttttggataaatgttttagtttatttataattgagtggttagtttttttttttttttttttttttttttttttgagatggagttttgtttttttgtttaggttggagtgtagtggtgttattttggtttattgtaagttttgttttttaggtttatgttatttttttgttttagtttttggagtagttgggattataggtgtttgttattgtgtttggttaattttttgtatttttagtagagatagggttttattgtgttagttaggatggttttgattttttgattttgtgatttgtttgttttggttttttaaagtgttgggattataggtgtgagttattgtgtttggttaagtggttagtttttttagttgttgggttttgtatattttgttggttttggagattatatgtattatgtagattttatttgttttttatttttagtgttgggggaggggttaagggtttgttgatgtgttgatatttggttatttattggttttgaatgtttatatttatttttttgaaattgatgttttgtattggaggttttatgtggatttgggggtagaggtttgtattttagatggtggggtggtttttattaattaggtagattttttgttttgttttgttttttgggttttgtagttttagatgtgtgtttaagatttgtggttatatggatgggataagttatagagatttagattttgtggtttttgtgattagagtagttgtggttttgtttgggaatgtttttattttgttgttgaaggtgagaaatttttttgtgttggagaatagttgtgttgagaagttggtttatttggtttgtaggattgttggggtaagggaggtttgttgttggttttttttttttttttttgattgggtgttttttgtttaggttttttgtagtaaaagaattttttaatttattttgtttttttattgagtttttattttatgaagtttattttttaattttagttgattggtttttatttttttaagaggaaggttaggggtagatgaggttgaaggaggttgatttttttgtgtttttgtagtttgagttgatgttgttgtatgtttatagggtttttttagtttttaaaaaggttttaatatgtttgttatatgtttgtggtttttttggatgttatattaatttagtaaggtttgagttagaggttgtttttgaggttgtgaaaatagaagaagggtttagaggagaatttttttatttgatgattttaggaaggttttttagaagaagtagtttttgagttgagatttgaagatagattaggtttgagttaggttagggagggtgtgaggggtttattaggtagagggaataggatagggtaggtatagaggtttggtatttggtttgtggggaagtgtgagtttttgggtatgattaaggtggggagaagtggtgtgagaggaggtagatgtggttggtaggagattggtggttttggttttgttgagttttattttgtatgtattaggtgatagaggttgtttaggatggtgggtagggaagtgataggttatatggttattttattaatagttgggagtttagtttggggggatttaagattttggggaaggtatgagttaggggtttgttagagttaggagttagtgggagaaggaaatagtgttgtttatgaattataaatagatatttttgtaattttttttgatgtgatataattttaaagtgggttatttagaggtgggaaggtgatttttggttttttaggttttgggtttgttttttttttttttttttttttttttttgagatggagttttattttgttgtttaggttggagtgtagtggtgtaattttggtttattattatttttgttttttgtgtttaagtaatttttttgttttagttttttgagtagttgggattataggtatttgttattatatttggttaatttttgtatttttagtagagatggtgttttattatgttggttaggttggttttgaatttttgattttaggtgatttgtttattttggttttttaaagtgttgggattataggtatgagttattgtgtttagttgagtttatttttaagttttttttggtttttagtgtttttgtattagtttatttttttggttttttgtttttaagagttttttttaagattgtttttaagtggataggtttttagaattaaggagtagttttaggagtttttagttatagatattttagggggtttgtgtggtttttagtttttggtttggttttggtagttttggttttttgtgttgttttttatatagtttggttagagttggttaggttttttggttgggttgagttattgtggttagtgatttatgtagggggagaaaagtgaggagggggaatagagtgtgagggggattgtgttaataataaatttattaggtttttgaggttattttataggagggataaatggtttatttaggttgatttggttgttggttggtttttagagatatttagggtggggaagattttattatttggggaaagtaatattagattgtttggaggggtttagttagtgtattttgtgttttttgtttgttttttatgtagagtgttttgtttttaaggtggtaggttaagagtgtgagttgaggtttaggtgtaaagaggggtgtggtatgggggtattgtagggtatggggtgtatgtatttttatttatttttttattgagtgttagggtaatttgttaatggggtatatttggtgatataaaattttttgttgatttatggtagtttggaatggagtggaagtgttttatttttggggaatttttatatatatttggttgtgaatgttggtgtttttgtattggagtttttttggagtgtgttgggtagagtggagaggtttttttttttttttttttattattttgtggaggtgttaatatgtagttagagatggttagtggtagtgaggagaggggggtaggaagagattagggttgggggtttgttagtttatagttttatttttgaatatttatggtttttttgtttaggttagtgaggttgggggtagagatgggtaggggttttttaatgttgggtatttttttgtttttttatattttggatttgttttttggagaaagttttggagtatttagaagttttggggttgttggttgaggtggggagtagagtttagttgtgtttggaggttttttatttttatttagtttttagggatagttttagttgtgtaggtttaggttgttgaggttggttttagaaatttttttataattattattggatggaaaattagttttttaaagggttttagagttagttttgtttttttttttataggtttttatagttagagtattgggtttttgttagagatgtagaagagatgatgtttttagtttttatgtggtttggtttttattgtggatgttggtgattttagttttttttttaaaattaagagggttgatgttttatattttaggtttttagaaagagttgttatttatttatattgttatattttttttttatttttttgttttggaaagagtagagtggatatgtgtttttgtagaaatttatttatagtttgattgtagatgtattttgtttttttattgagtttttgttttatgaagtttgttttgtttgtattttttttttttttttttttttttttttttttttttttttttttttttgtttttttttttttttttttttttttgttttattttttttttttttttttttttttttttttttttttttttttttttttgttttttttattttttttttttttttttttttttttttttgaatagttaaagatagaatgaatggtataggtaggtattgagttttttgtaattggaggtgtttaagtgtagggtggatgggtatttatagggtaggtattgaggaaggatttttttgggattgtggatggtaggataggttttgtggagttttttgagtgggtgtagaagagggagggtatgtttttgttttttgttttttttgggttgttaggttgttatttttaatttttattttttttttttttatttgttgggttttatgggatgggtagaggtattgttagaatatggagttgtggtttatagagggttagtagggaggagagttttttggggattatgttgttttagttattgtggtgattttgaaaataaatgtttttttttttgtttgagtttttgttgtttttgttgatgtggaattagggtaggttggtgatttagtttttatttttgtattgtattggtggtaagttgtttttagttttagattttatagagtagggtgttttttttagaaaaatagtagggaggttaggatattaagggttttagggatagtttgttttttttggttggtatgagttttagttaagttttttggtattttgggggtgaggaggtattagttgtgtgttttagttattggttgttttgaggttgggttggtgttaggttggttatttttttttgttttttagtgtgattttgtagagtttttggaagggttagagggtttttttttattattggtgtttatgggatattgtgtttttattttatttttgtattttagttttagatgggtgttaggaagttggagattttagttattttatgattgtgttttgtggggttggagtaggaataggagtaggaggaatgttttggttatgggattgtgtgaagagagaaggattaggaagaaaatatgagttattatgtttgggttatattttagtagagttgttggtggttttttaggtatttgaatttattaattataaagtttattaggtgtgtaaataaataaatgttgtttaggaggtatagttagggttttgttggagagggattattttggaggggttatattttttatttagttttttagtttttttgttttgtgtgtgtgtagtttttgattattattatttttgtttttgttatttgtttttagggttttattaggttggatgttattgtaataaaatgtagtaatagaaggtttaggtagtgttgtagtttttggtggtattattagagttagtaggtagtagggttggggaattttaagttgatttagttttaagtgttggagtggggagtttggatgaggtgggggtggggaattggggagttatggagtagagtatttgttgtgttgaaggttaggagtttttttgggagattatgaatttagaatattaatattttgtttaaaaagttttttgttttggagataagagtttaggttgttgtggttaggttttgttgtaaatgttttgtataaagtaggttggggggattattgggaagtttggggaatagattggttatgtgtttttttgagtgaaattttatggttgtattgaagtggttaggtagagggtgtgatggggtgtggtagttgtatattggtttagttaggttgaatggggaaatgtaaatttaggtggtttgaaagagatttagtggtttatagtttggtggttgtttttagtataggtgatgtaaagagagaaggggttttgggggtttggtttaggtggaaattatgtattgtttgtgattttgggtatgttgaggttggagtaggtttgtttggtggttggtagaatgtatatgaagaatttatgtgtgttttgaatgttttttttgtttttttgggtttatgttttattaggagttttttgattttgttattttgtaaaggaaattgtgttttgttattgtataggattgaataggtgtgtgtggagtttttaaagttattgttttaaggggttttatgggataatgggagagttgttgtgatgtttaagattaaagtgatggttgggtgtagtggtttatgtttgtaattttagtattttgggaggttgaggaggatggattatttgaggttaggagtttgagattattttggttaatatggtgaaattttatttttattaaaaaaataaaaattagttgggtatggtagtgggtgtttgtaattttagttatttgggaggttgaggtaggagaattgttttgatttgggaggtggaggttgtagtgagttgagattatgttattatattatagtttgggtgatagagtgagattgtttaaaataataataatgttaataataaataaaataataataataaaataataaaagtaaggatttgaataaatatttgtatatttatgtttgtagtagttttatttttaattgtttaaatgtggaaggaatggatatataaagtgtgtgtatatatagtggaatattatttagtttttaaaaggaatggaattttgttattatatgtgaattttgaataatgaattttgaagattttatgttatgtaagtttgttttataaggataaatattgtatgattttatttatgtgaagttaaatttatagagaaattggaatgatggttgttagtagttaggggaaggaaggatggggagttattgtttaatgaggatagagttttagtttgggaagttggaagaagttttggaggtggatggtgttgatgggtgtataatgtgaatgtatttaatgttattaatatggaaatttggttaaaatggtaaatttgttttttttgtttttgttttttttttttttgagatggagttttgttttgttgtttaggttggagtgtattggtgtgattttggtttattgtaatttttgttttttaggtttaggtgatttttgtgttttagttttttagagagttgggattataggtgtttgttattatgtttggttgatttttgtatttttagtagagatagggttttattatgttggttaggttggttttgaatttttgattttaggtgatttatttattttggttttttaaagtgttgggattataggtgtgagttatggtggttggttaaaaatggtaaattttatattatatatattttattatagtaaaaatgtattgttttattagaaaaatgatagatttttataatatgaattaaattataagttatgaaggaaaaattaagtaaaatattaaaaaattatttataagtaattatatttaaaataaaagataataaatatataatttttattattttttaggttttttgtaatatttaattattgtttgttttgttgtggttatgtttttgaggttgtatttgtatgatagaaatattatatttgtggtgattaaatatttttttttagttttatttttaatgatgttatatagataatttgaaattggttggttgggtatgatggtttatgtttgtaattttagtattttgggaggttaaggtaggtagattatttgagtttaaaattagtttggttagtagggtgaatttttatttttagtaaaaatataaaaattagttaggagtggtggtgggtgtttgtaatttgagttatttgggaggttgaggtaggagaattatttgaatttgggaggtggagtttgtagtgagttaggattgttttattgtattttagattgggtgatagagtgagattttgttaaaaaagaaaagaaaagaaagaaattggttaaggtaggaatattgatattataggaataggtaagtgttataaattgggaaattgagtgttgttgtttttgttggttttaggtggttggttgttgattgttaattggtatattattggaggagggaggtttagattgatttgtagagagattagaggtagaaatgtattatggtttggatgttgagggtgagggaaagagaggagttaatagtggtgtttggagatttggtttgagtaattaggtggatggtagtattgttttttaagatgaggggttgtgggaatttgaggggttgtggaaggttttgttattgatggatttagggtttggtagttttgggaggtttattttgtgttaggttatgtagagataagattatttgggttttgtttttgggaagtttttgtttatgaggatatagtttgttatttaatggggtgttttgtttggagttttagtgttgttgggagaaagttttttatttttttttgttttttgagttttttttgtttttttgttagttgagtttttttatggaggttgtgtttggaggggggttatggatatggatgtgtgtgttaaatgttgtttttttgtggattttttttttattttgtttttatgttttgtaagttttatttttttggggtttgatttgtggggtttttttttagatttgtttttttttatttttagaaaggtgtgtaggggttttttatggtttttttttttgtttttatttttttttttttgggatagtgatttgttggatgggtgggttatttatagggtttgtgattgtttagatatttttgttgtatgaagttttgattttaaggtatgatgtagatgggaataaggtatgagttttttttggttgttgtaataattgttgaaattgggtggtttatagtaaggggaatgtgtttttttatagttttggaggttagaagtttgaaattaaggtgttagtagggttagttttttttgaagattttaggggaaaatttttttttgttttttttagtttttggtggttttaggtgttttttggtttgtggttgtattattttggtttttgtttttgtttttataaggtttttttttgtgtttttgtatttttttttttgttttttagaaggatatagtattgaatttagggtttattttattttgagatttttgtttaaattttttttgtagagatttttaaatagaattaggttatatttgaggttttaagtgggtatatttttgttttgggggggattattggtttattgtaggttttgttgtgtattgaagatgtaggtggtttttttggttaggtttgtagttggttttgtttttttttgtgattgtggaagaatgtattttgttggatgtataggtttttatagtttttttgtttttgttaaattttagtttagttttttttttgttgttggtgtgtattttttttgtttagtgttttttttgggattgtgtgtttaggttttgaggttttagaaaaggggggtggagggtttttttattattttgtagtaatgaggttttattaaaattttggagttttagattggatttagtttttagttatgattaaaggatagtttgggatatgattaaagggttagagaaagatgatttaggttgagaaagaggaggttaaggagtaattggattgtttttgaatgtggaaaaggtaattatgatttgaagggtggtgtttagttgttttttattttttttgaggataggaaaaaaaaggaaataaatgatgtataattagagtagttggttagatatgagggtgaattttttggttgggagtatggttaagttttgatttgggttttttgaaagagtttggggaatttttttatttggaggtttttaggtttggttatgtggttttgagtgattatattgaaggggtagtggttggggttggagttggtgggttttgagtatagttatgaaggtatgtgtattttttggttgtttttttgttattgttttttgggtttttattttggtgaggtgtgtattttggtggtgttttttagggaattaaatatgtttgttgtattgtgtgtggagatggagaatgtataattggttgattttgtgttaatttggtggaattttatgttagttttgggaaagaataattgtatgggtgtgtttatatttattaggtgttttttagaaaaatatttgagaataatgttgtggtttaggatggttgttgtgttggatttggtatttttttaggggggttgtgttgttgggttgagttttttaggtattggatttttaaatttttaaatatggtgtggataggtggtttagtaggggttggattatttgataggtttaggtgttggagtttagataagatatattttggtttggtgtggaagatatggggtgttattaatggtagtaatggttgtatttttgaaatttgggtttttaggttgatgagggtgtgtatgtatttgaaatgtttgtggttttgtagtttttatgtttataaatttatttggttgaaaatagtttaaaatatttaaagtatgagggagggagtgtttgttttttttaaaaaggaaggatttgattttatttatttaaaaagttatttaaatttagaatattttttgtaagagattttttgttttttgtttttttagaatggttggagagttttagtatttttgtatatttgggatattttagagggggtggggaggggtaagtgggtagtgagtgattttagatttaggatgagttgttaggtgttttttggttatatatttaagggattggagtgtagttgtagtgttgtggtttgttgttttgggggtgggggtgttgttttatgttgtgaatttttatatggtttttgattttgggtagaggttgagggtttaagggatggggtgatagggagagtatgtaggagtgggtttttggttttttagggtgagtggaagaagtgttttttttttttgtaggtgatagatttggggggttttttttgaggatgagagtttgttgttttttaagttttgtgtttaatttaggtttttaggtttattttagttttttggttttgtttgttttgtggatgatatagtttaagggtagagattgttggtttggagggaaggttaggttttaggttagggtttagaagggagggagaagtttttggggtagttttttttttgtttatttattgtttagtttttttttttatatttttttttggaaatgtttgtttttgataaggtttattttttgtttttaggaggtttttattgtggaggaagggaggtgttgtttgtttttggtttttttgatagttgtgttttatttttgttttgtgtttttttttttggatagtgttttttttagggtttatttaggagggtgtagtggtggtttttggggtggtggttgtggtgggggtgttagttgtaggggtgtttttggtgggtgggagttggtggttttttgttggtgttatgggatttgtatgtttgttttgtgttttttggtttttgagtttataggttgggattttgtttgttagttgtgtgtgttgttgtttaatttttgtaggtgtagagtgtgtggtggtggtgatagagaattttgtttggttgtttaaatatagttttttgtagaaggattttgtgtttggggaaggggaggaatttttttttttttgggtgtttgttttttttgttatggtttggtttttatatttgtttatatttggttgtagtggggtgtttggggggaggggttgaggttgtgttttttgttgttttttgggtgtgggttaggtggggaggaggggggtgttttggttgtgtgtttaggattgttttttagtggttatttgggttttagttttttaggtttggttttgataggtgggtggagtagttagtgtgagatagggaggttggtgtgggtgtgggaatttgatttgtttgggaggtgggggtggggtgggggtgtagtgtgtggggaggggttggtgtttgttttttttttttatttatttagttgagttagggggtttaggggtttttttggtggttagttttgtattgtaggagtgtgggtgtggtgttttagttagtgtgtagggtttgggttttgttgggggtgtttttttgttgttgttttttgtgtgatttgttgtttattagttattatgttggattttgtggttaatgtgtagttggatgggattattttggattttgaaggtgggtgttgggttggttgttgtggttgtggatgtgttggagaggattttgtgggtgggtttggtgtgggatgggggtgtgttgaggggagatgggagtgtgttgaggggagatgggatttttaatttaggtgtttttttgttgagagtgttgtgtgtttttggttttgtgtttgtgttgtttatgtgggggattttgttaggggtatttgtgtagattttgtgtgtttttataggattttgtgtttgttttgtgtattgttgtttgggtttttttttttttattgttgtttgtgtttgttaagtgatagtgatttttttgagggtttgtgaggttgttttggaattttttaggatgtatagttttattttgggaaatttattggttttttttttttggttttttttggtggtttttgggttttgtttggatttggtaatgggatagggaggttgttttttatttttgattgagtggatagttgtgttttgtttgggtggatagttttttttttttttatgttagttttggggttgttaagttgtgtagtttgtgggttgggagtattgaatggatatagtttaggttgtggtagggtttagagtgggatgttttatggtttttatttaggtttggggatatttttatttgttttttagaattgggttgtgggggatagaaggggtttgtgtgtgggtagggagagtattttggtttttttttgtttttggggtttataaagtgtgttgggatttgtggggttgttttgtttaagtttgggtttggtgtttgtgtttttgagtttgtgagtgtgtgtgtttttttgtgtttttttgattgttggtgttggggttttgtgttttgtgtttgtgggagtaaatatagtaggtgaaggggaagtttatataatggtttttagtgttttggggtagggtttttgaggggtgggtttgtttttgttgggatttggagtttttgttttttggagaggtttttaggttgatttgggtagagttttttggtgggttgggagggggaaaggttgtgttgaaatgagtaaattgtttaggtgttaggttaagttgggaggtgattagtttgaggttttttttgttttatggttagaattagggttgatatttgggtgttttgagtttagttgtttatatggtttatttggggttagttttatttgagtgggggaggtggggttttttgggggattagaattttggttggatgttaagtagagtgttagtggttgttttttagggttgggtttgaggagggtgtggggtggtgaagggatgggagggggttgtgatttagtggttattggtgttgtgtagagtgtgagttggaaatattgtagttattttgttagtttagtggtgaaagtttttttttaggttttatttttttgtatttttgttttttagagggaggggaggtttgggtttgtagagttgggagggtttgttgtttttgttttttttttttataatatttttttatttggatatttttgggtatatgtttatattggggtttttttaggtttattgtgttttgttgagttttttgtagtttttgagtgaatgtgatttttttgtttttgtttttttgtaatttttttttgtgattgtttttttaggggttttttttgttttaaatgtttaagtggtatgatttagttggtttgattattttttagtaagtttttatggagagaggttttgtgttgtgtagagttttttttttgtttgtgggattgaggtttttgtttttagtttttaatagaaagtgttgggtttttagtgggatttttggggaagaatttttgtgttttaatgggagttttgtggtgggaggggaggttagggtttggggttgtgtttgttgtatagttgttattatttgtattatgaaagttgttagtgttttttttttgggtttttgggtgtaattttatttttgtttttatgtgtttttatttggagttgtttttgtggttgttttttaagttagttttgtgattttgtaatttagtttaagataatgggtttattgagattattttggtgtagtagttggtaattttttggttttgggggaaggttttttagttttggggagtggggttttaatttgttggttttttgtgtttattagttttttttttgtgtgttttgaatggttttgttgggaattttggttttagagttattaggtggtttgagttgataggtgtgagagagtgtgtgtgtgtatgagtgtgtatgtgtatgggggttgatttggggtatggaaaggtggttttttttggtgtttaaggagtttggagtatagttggagggtgtgggggtgtgtatatgggagttggataattttgggtggatagatagatgtggggaagggatgattgaaggaggtggaggagagagtgtgatttagtttagttaggggtgatgtggataggtagtttttgaattagggtagagaaaagttattattagttagtaggggagaagttagtatggaggaggtggattttgagggagagtaggaattggattgtaagaggaaggagagttttttggttagtagtagttagtagtagtgggggaggttggaatgagttggttggagagggggttggggtataaggaggggtttgtttgtgaagattatatgggttaggttgtggagggttaggtatgtttgttgggagtgtagttggtttatgggaagtatttggagtggttgggaatgggtgtaggagtagtgttgtgggagtataggttttttttttggggtggtttatttggtgttttggtttttgtaaggtaggttgaaagggtggggaggaaattgttagttttttatagtgttgggatggtggttttagggtttttgaggttagtggatgtgggtgtttgttattatgtgggttgttgaggggtggagattttaggggttattttaaagtaggatgagttttgagttatggtatttttgggggtagttttttaattgagtagatgtttaggtttggaattttgtaatagaggttatagggttttgattagggtgttttgggaggtttagaattagtggtagtatatagggtagatggtaagtgatttggtatggggaaagaggtaggtgtttaggttggtatagtatatttgtaaggaataggtagatgggaagttgtttgtgggtttgtgtgtgtgtttggagttaaaattttgttaatgttttatgttttgggtatatttattttttttttggggagtatttttttttttattttttttttttttgtttgttttttttatttagggttttttttattttttttgttttggggattgagggtattatggttttatgttttattattgatgagttgtatagggatttagtttttttgttgtttaggttgggttttttaggtttagggtttttaggaatggagagggtattagtgttttttatggatttaaattttttgtattttgtttttgttttttttttaagataggtttttgagttttaaggttttagggttttgtggaggttgttatgtagtagtaaggagaatgttttgtatttggttgatgagatttttagagttttattttttatttttttattgtataaatgggtttttaggtgattgtagtatttgttattgtttgtaatagggtgataagagggatgattttttttttttttttttttttggttggtggaggtatggggttggtggatggtatgtgtttttgtgaatttaggttaaatttgttattgtaaatatgattataatttgggtttttgtgtaataaaagtttttttaagtattagttgttggtttgttttgtttagtggtgtttgttgtaattagatttgtatattgagaaagaatttaaaagtttttgatgtttgttgaaataatttggtttaggatttatgtgtttagattttagagttgtgtggtatttgagttttttttgagtttttattgttgtttgaggaggatttttagatttgtgttttggaggtagagtaggttgtgggatgggtttttgggtgggaaggattatgtggatatgtttttttgtttgagagttttaatatttttgggatgtgggagttggtgtgttggtaggatttaggtgttttttttttttttagagaaaaaggttttgttgtttggtaataggtgtagatttgtttttaattaatgttagtaggttttttgtgtgatgaattttgttttttagttaagatttaaggtattttgtgaatattgtttttttgtagtttgagtttttgtggtgggaggtaggagttatggggagtgggggtaggttttttatatgggttttatagttattggtagtattgatttgatgttttttgagtttagagtttagggttagatagatttattgttttgattatgagttggtttatttagaggggggtggatatagtatttaggtagtagatgtattgtgattagttttgtagtggggttgtgggttttttgggttggatgtttgggaagaggtaggtggaggtaaatgttaggatatttttgtagtgattgggtgattgtaggttggaaatgttttttgtgggttgtggttgtttaggaaggttttgaatggggttagtggatagagtttgtatttagaggggtagtgttttggaggagtgaggggtatggtagtgtagggatgtttaggttgtttttattttgttattggaaagttgggtggttttggtttttttagtttttttgtttgtttttttgtttgtaaagtggggttagaaatagttttttttgagggttgttgggggattttgagatgtagtttatggtgttgagtatgggttttgttttttatgggtgtggtgggtgttgtggttggtgtggtatttgggtgggaaaagggggtatttgtaaaggataggtaggtttggatgtttaaatatgtagatttggggatgggaggttttaggtaagggtttgtgtgatgttattgtatgaatgaggttggatagtatggttattattaattatggaaagtatggtagatattagtgttagtagtgtttgtttgggggtttttttgagtttgataggtatttaggtttttagtgtagttatgggatttttttttttttgtttggttgatattttggaggttggtgttatgttggttgtaggttttttttattgggaggttgttttggttttttttgttattatttatttttatttttattttggagtgttatagatgggtggattatatgtttatttgtagggttaagtgttgataatgaggtgagtatttgttggatgattggattatgaggatagtgggggtgttggtagtttgtgtttggttttgtaggttggtttttttttgaaaagtggttgtggtagagtgtgtattttagggagtggtgtttgttgttttgaatatttttatttagtaggtttttgtaagggtttagttaagtgtggtgtagagttgggttggtagttggaatagttttattttgtttagtggtgagattaagggttgatgggttaaggttgtgtgttgtttgtttagtttgtggatttatttattgagtatttttatatttttatattgggtttggggtgttaggaggtggaggggggattgggtgtttggaaaaataagtttattgagagtttgagtttttaggggttagtattaggtagttattatggtgtttggtatatagtggttatttggttttgttggttgttttggtggtggagagtgtgtatggtggttgtatgtgatgggtattatttagggtaatatagatatgtagattgtgtatttgtttgtaggagttagggattttttagtttggtaatttgtgatttttgtttatttgttgggagagaggtgttgttttttgatagtttggtgttgggagagtagaattagggttttttttttttttttttattttttattttttatatgtttaggtattaggggaggttatatttagggatgagttttggttattgggtttagggttttattgttgttattttttttttttgttagttagttaaatgtttgtttattattgtgttggggatggggttggtttgtttttttgaagtttttttggtgtatagtttaggttggagttttggatgattttgttatttttttttttgattttttttttttattttgatttattttagaaatttagttaaaaattaagtttttgtgtttttttttgataaagttattgaggaaaaatggttaaatattgtttttttttttaaagtttttttggttttttttaaatttggaggttttgagttgtttatgagattaaagggtttggaattttttggaatatagttttagaagtgggaggatttgttatttttttagttaaatagatttattagttggtttttagatatttttaggtgtttggggtatttttgggtttaggttgtttaatttggtttgtagagttttgaggttttgtttagattgggttagtagatagttttagagattttaagtttgttgttgtttttaaaagttttgttaatgtttagaaatttagagggataagaagatgattttgatgttagttgggattataaatagtgaggtttgtttttttttttatttatgtttgtttttattgtttttgtagttgggtttttaggggattgtttgtggttatgggggaggttgggaatgtggggtttagattttattgggttttttgtatttttttgtttttttttgtttatttttttttttggaaatttttgaatatttttttatagtttttggtattttgttatttttggtatttttgggttaattgggaaagttattatttgtttaatatttagaaaattaaggggtttggttttaaatatattgtagtgtttttttttttatatggtattgaattttttgtgtttttaaagttaggagtttgtgttttggatgtgggtgatggagttttgtagatatttggagtggtttttttgggagagttttttttgtttttttatttatttgtttttttttttttgttttaagttttggttatagttttggaggggttatttgagtgtaggttgtttttaggtgtatagttggaggggggtagttattttatatttttttgtttgttaggggtatttttagggatttaggttttgagggatagtggaagggtggggtggggagtaggttgttgttttgtgttatttgggtgttatgtagattttgaatgggtagtttttgggagttggttttttttttttattttttttatagtgttgtttttttgaggggttggagttttttggagttttttgtagtttgtggtaggtttttttgattttgtgtttggttttgtagtttttaatttatagttagtggtatgaagaatatttttggttgtttttatttgtggtttttgtaggtagtagttttttggggtagggtttgggggttttggtatttttttgtgggattttttgggtatgagggagggagttatttgggttatagatagattttttttttgtatttaggaggtttaggatggatttgttttatttttttttttggtgggaagagagtatttttggttatggggaatgtggtttggatagagttatttagtttttttttttttttaggtagggttttgaaagatggagatggttttgtttttgttaggttaatagttagtagtttggtggatttttatgtagtttaggtaggatttttttttgtttttattttttattttatgtgtaggaagttggttttaagtagggatttttggttttgttttttatgtgggtgggtagtttttttgtgaggggtaggttaggtttttgttttatgttttttagagattgatgttatttatagtaagagtatataagtttttttggttttaaattaggtttggaggggtggtttttttttttgttttttgttttttgttttttattaaaggttagggaatggagtgttttgtatgtttgttggggttgggtttttttttttggtttaaaatgaagggttggaatttttggtgtagattgtatggtgagaggtgttttttgggatttatttgaggagtattattgttgaatgttttgttaggttaggagtattgttgggggtgggagaggtagttggtttatttgtttatttaatagttatttatgggtattttaagggttagttttgttttaggtattgggggtttaggtatgggtttaggagaaggggtagaatgggagggttttttggaggaaggttttttaattagagattggggtaggagtttgttaggtaggtgatgttggttagttttttttgttattttttttttttttttttttttttttttttttttttttttttgagatagagttttgtttttgttgtttaggttgtagtgtagtggtgtgattttggtttattgtattttttgttttttgggtttaagtgatttttttgttttagttttttgagtagttgagattttaggtatgtattattatgtttagttaattttttgtatttttagtagagataaggttttattttgttggttaggttggttttaaattttttattttaggtgatttgtttattttggttttttaaagtgttgggattataggtgtgagttattgtgtttggtttttttttgttatttttgtagatttatagtgtgtgtggaagattgtatgtttgtgtttggtatagttgtttttggtatttaggtgggaggtgggggagagggttgttggtgttagtataggttatggtatgagataggtttttgtagttaagtggggtgtattgtagtattggaggggttttgttgtgtatgagatttaggttttgtatttgtttttttttttaggaggtttggagggttgggagggattagggtggtgaaataatttaggtgggagagaggtattgttggagaggtagagggagttgtaggtttgtagtagtgagttttaaattttgggtttttattagaaaattttagaaagggttgttttgtttttttttttaaattataaaagaaatttttggttgtttgggttttttggggttgggtgggggaggagattttttatttgtatttttgtaggtttagtattgtgtagagggaggagggtggaggtaaaggtgagggaggagggtggaagtaaaggtggggtttttttttagttttgttgttttgtttggttgttgtttttagatttttatttttggtttggaaatatggaattttgggatagttggggtagggggtatagaatggagattttggtgagggaggaattttttttttagttttggttgtggttatagtaaggttaggttgggaggattttatttaaatatttatattttttttaatatttaaatgatgaagtaggtttttgtatatagttgttttggagttagttgttgtttgttttatttttttttttttttttttttttttttttttttttttttttttttttttttttttttttttttttttttttttttgtattttttgtttttgatttaagtttaggtttttttagttgttttttttttatttataggtattttttgtgattgagtttttttttgttattttttataattattttttttaattgagtattttttaggtgttaggttttgggttggtattttgtatataaggtgttttttaatttttatgagagtttaataaggtagattgggttgttgaggttttagtgttggaaggttggtttgggtttttttagtttgtatttgtatttatttattatttttttattgtggagatttgttttttggtttttggttgagtatgatggaaatttttgtttattagtttttggagagtggggatggttgagggttttgattttggggtttgatgggggttgtttttgttttattttagtttggttgtttttttatttaatgattgagtttgtaaaattagaataatagtgttatttggttggtattttgggtggttgggaggtgtgggagagggtgtatggaggggttgagtgaggtgttagtattgtggggatttttgagggtagtttttttaggtttagggtggagtgtaggtagagggtgtgatggtttagtgtgttggtttatatttggttttgtttttgtttatatggtaatgtgggggagttattagttttttagtgttttagttttttatttgtgtaatggggataagagtaaattattgtttttaggtatggtaagtatttatatatattgattattgtagaatgaatatagtgagttttttttaggtttttattatatgttaggtagggtgttaggttttagtggagaggggataatgatgggtaagttggtttttgtttttaagggttgttgagtagggaggaaggtggtggttgttttgattgtgatttggagtggggtgatttgtaaagaggttggtgggaggttggttgggggttggttgggggttgtttttttttttgtttgtgttttgtggtagggtattaaattggttttttttatggatttttgaggttttgattgtgggattttgggtaggttttgggattttgtgattttgtttttgtttgttatttaggtttttgtttttagtagtgtttagtatatggtgatttttgtatgttttttagtgtgtgattgattttggagttgagatttggtagttgaggttggatattgtttttggataatttttggggaggtgggggtagggtggggttgtgagttggtaattttgagtttttagtagtttttgaatggaggttttttttttgtaggatttttggggaggaaggaggggatgggggagatgaggtttgtgagtttttaggagggtagaggtttatatttgtagtgttttagaaatattttggggtgtttaggtttatttagtttttttgagttagaattattaagagttggggattagtagtttattttttagtaagatttagaaatgatttttttgaatagtttgagttaagaatgatatatttggaattagaatattagaattatagaggaattgagagaatgggtttaaaatgtgtagggattttagttatatggtgttatatggaggaaagtatttaatattattattgtatgaatttgtttaaatatatatatatatatatatatatatatatatatatatatatatattttttagtaaagagtggaaagatatttgttagaatattgatggaagttatttgggttgtgggtttatagattttttttttttgtttttgtgtattttgtaaatttttggttttgtgtttaaattttttttatagttaggaataaagtaatagatgttattttttaaagtttatgggtttgtgtttgtaattttaatattttgggaggttgaggtaggaggattttttaagtttaggagtttgagattagtttgggtaatatagggagatttttatttttttttttttttttttttgatagagttttattgtgttttaggttgaagtggtggtggtatgtttttggtttattgtaatttttgttttttaggtttaggtgatttttatgttttagttttttgagtagttggattatagatatttatatttgtaggatttgagaattttataagaggaaagtttttatttggaggttgttggggatttggagttgttagtttatatattttttagtagagatagggttttattatgttgattaggttggttttaaatttttgtttttaagtgatttatttattttggttttttaaggttttaggattataggtgtgagttattgtgtttggttatgggagatttttttttaaaataagaataaaaataaaaataaataaaagtttattgttaaaaagaaaaatatattatttaatttaatttttttttaggattgagagatgaggaagtagaggttggaaagtgttatattttttggttgttggtagttaggggatttgaggtttgggttggtttttttgtgttttaggtttggggtgttaggtggagtttttgttttgtttaaaggtttaggtgtttttgttagtattgtttgtttttgtatttttggttataaggaatgtgggttaaaggtagggtttttgatttttgtttaggagggtgaagtgggttggttttttttgtttttgttttaaggtttttgtggttgtgtttttggaaattgttggtttgagttagtgtgtggagttgggatagattttattgtggtttttgtggggttattttatgtttgggttggaagggattttttggtttagttttttttgttttttattaggaaattgagattagagaggttatttgtttggtttggggtggggtgtagatggtgtttgtgatttttgtatgttatgtgtagatagttttttagttgtgggttttttatgtaagtagttatgttggggataatttggttgaaatttgtgatttaatgaagagaagaatgattttttttgtagttttgtgttttataggtttttttttgtttttattttttttgtagaggggttttatgttggtgggtgggtttttgttgttgtaatgggtttaggtagtttttgggtagtggaggtttggttgtttttttgtttaatgttttttgtagtttatgttgtttgggaagggtggggaagtatttagttattggggattttataagatgggtatttgggagatgttgattggtaggttaggtttttgtggtttataggtaggttagaggttatagtgttgagttgggttgagttggtagtttagggtagtgggggtgggggtattttgtttagttatgggtttttttggtataagggtttggagtttattgtaaataatttttttagttttttttttttttataggttattagtagaattgaggggttttttgttgatgaggtgtggtttgggaggggttagttgtttgtttatttgatttttgtggataggtgattataggttttttgttttagggggttgggggaaagattggggaggtttttttggtttttttatttggaaggaaaatatgggtataggggagatattttatagggatatattttagttagtattttttggttgtgttgggggtatagtgtttgttttgtttataagaggggttagttttttttaggatttaattttagtttttagtgtagggtagatgagtatttagaggtttagaggatttatattatgagagagaagttgtgattatataggtattgaaggttaagtagaagagtgggatatatgggtgatttgaaagttttagggttagtgtggttagttttagatagttggggagttttgggtattaggtttagtaggggaggagggtttttgtgatagtttgttggggttgttgtaataaagttttatgaattttgggggttgaagatggttttagaggttagaagtttaaaattaaggtgttgattaggttgattttttggggtttttgtgggaggttttggtttaggttttttttttagtttttggtggtttttgggtgtttttgggtatgtagatgtgttatgttattttttgttttgtttttatatggttttttttttgtgtttttgtgttttgtaaggatgtttgttattgtatttagagtttattttaaatttaggatattttttttttgagattttttattgtatttgtaaagattttattttaatttttgttatatttataggtttgagggttagggttttggtatgttttttgggggttattatttagtttattgtggtagttgattttaggggaagtagaatgttttaagtttggggtgagtggagggaatgttgttgggtggggagtgggagattaggtttggagatattgtggattttttttgtttgatgagggtgtgatgaggtttttattttaggttttttgaatggtggttgtttttgaggagatttttttttttggatttgtttttttagaaatttttatttaggtttaggttttaaggtggatggtaagaggtggttgtttttgttatatttgatgggtgagtgtgtgaatggggttgggagtaggatatttgttatttttgtggatagattttagaggtttatgaatttgttgttggggaaggtgtttgatttagtttgattttttatttttatttttttttttttgtttttttttattagttttgtttttagagttttatttttttaaaggtaggtgttgttttttggattttttagtagttattttttattttagattttttttttgtaggtttttttggttttagtgtttatttttttttgggtttttgtttttttattgtgaggtttttgggtagaagtgtggggtttttttgttgtgtttggtttttgtggtatattaggggtttttttaggggtttgttttgtttgttaggtttttagggagttttttaagtttttagatgggtttgatggagttttttaatgtgttgttttagagtaggaggggttttggttgagtttgagagtttttttagttatattttgggttgtttggggtagttaggtagtttgttttttggaggtgttgtttttttttggttattttttttggaattttttgtgtttagttgtggttttttttatatagtatatttattatttttttttatttgtgatttttttttgttaatttttttatgtttttgagaatggagattaggttttttttattttggagtttagtagaatttaaattaggtagatttgtgtaggtttatgtgggggttttgtggttattgtggttttgttgttatttttagtttagtttggtgtgttttggattatgttatttagtgttggttttttaaattttttttttggttttgtaggtttgggaagtagttggtttttgggtgtagttgtgattggagtttgaattttgttttttggggttattgttttttgtaattaggttgtagtttatattggtttgggtagaggttattggttgtttgttttggggttataatatagagagttttgtgattaatggaggttttatttgggttaagtggtttttggtgttaggtgtttttttttttttttttttttttttgtattttttaagtgtttgtaatattttttttaatggataatgagatgaggagggagggaggggtggtttttttgtttaggtagattaggaatggttattgtttgtgtgtgtagtgataggtttgggaatagataagggagagtttgtttgggaggttggatttttatattgatgttgtttgtgtttggtagttttgttttgggttttagaatagatattgattaatatgttttttagggtttttaggtttgggttttggtttttggtagagttttttatttatgggaagaagtattgagtagttttgttggttttttgtagggagttgggatgtatttttaagagtagtatgtgtgaagtttggggtttgggtaaaggagtgtttggggaagagtttgttgttgttggagggttggaagtagaggggaaggaggggtatgtggtaggttgaggaggtggttggtgattttgtggtggggatgagggggttatgagtagattaggagttagtattatgtttttttgtttttagaattgaggatggagagttgttagagaggttttggtggggtgtttggggttatttaaagggtgtgggtggattaaagttgaggaaagttttattttgggggattttgtatttaatttttgaggtttttagagttgtagtttgtggttttttgaagttaattattttttagggttttgtttttgtttttagtgatagttatttattagggagtttttgatttaaggagatttgaaaggttatttggttttttttttatttttaggtaggttatatttagatttttttatatagatttgttttatttttttgttgttttttattagggatggagggtgggtggtttttttatttaggttttggtggttttattttagttaggaaattttttttttttatttgttttatatttttttttttgtggtttttgtttatttttttttaatttgtttttagtggagtagttagtagttggtttagaatttgggggtggggggagtgttagattagtgtagtatatttgagagtgtgttagaggtgtttttatttttatagttgatttagtaaagaaaagaggaagtttagtaatttagtgttattttaaagtttgtttggaatgattttgtggttgttggaattaggggtatgtggtagatgatgggagtaggtatagagaggtttttgttttggattagttgttgttgtttttttggaggttgggttgttttttaagaagaggatttaaggttttgtgagtggtggttttttttggagtttttattgtggttttggttttgttttgtgtaaagagagatggtttgaagtagaagttgttatgtggttgttttaggtaggtgtttgtagttttagttatttgggaggtggaggtaggagaatggtatgaatttgggaggtggagtttgtagtgagtagagatggtattattgtattgtagtttgggtgatagagtaagattttgttttaaaaaaaaaaaaaaaaaaaaggagtagagaaattttttttagaaggtttgtagttattttttttttatgttttagaggtaaaaaaaaaaaaaattgtatattttgttttttttttttttttttgagatggagttttgttttgttgtttaggttggagtgtagtggtgtgattttggtttgttgtaagttttgttttttgggtttatgttatttttttgttttagttttttgagtagttgggattataggtgtttgttattatgtttggttaattttttgtgtttttagtagagatggggttttattgtgttagttaggatggttttgattttttgattttgtgatttgtttgtttttgttttttaaagtgttgggattataggtgtgagttgttgtgtttggttatatgtttttgtttttgaataggtggttttttgattttgggtgtggttattttaagattttgttttggtggggtataattttggttttaggtagggtgattgtataatttattgttttttgggggatatgttagtgaaagggatttttgaatgattatggtgggataatagatgtgagttgggtttgttttaggaaggttggatgtatgggttttttgagttagaggagataatagtagaaagttttgtggttgatgggattgagtaggagaagggttggtggaggttggggtaataatgtatttgtttattgtgaagggtttgtgtgagttgatggttgatgagagggtagtggggtgaggttgttttttgttaggttagattagttttaggatatttatattttttttttagaattggtgatttagtggttagaaggggttttagaattgatgggatattgagggagttgaatggaatggttggagtggttatagtaggttttaggtttttttttgttttttttttgtgttttgtttttggggtttatattttggggttgttgtaatagagtgttataatttgggggtttataaatatagtttttggtggtttttggagatttttggtgttttttggtttgtagatgtattattattatttttgatttttggtttttgtttttatgtggttttttttttttgtttgtgtgtttttttttttttttgttttttataaagatgtttattattggatttagggtttattaaatttagaatgattttattttgagatttttattttaattatatttgtaaagatttgttttttaaatgtgattatgtttgtaggttttaggagttaggatttaagatatattgttttgggggatattgttgaatttattatatttaataaatttagagttggtgttaatgttttttgtggatattatagtagattttggaggttttttgtaaaggaatttgtaggatttttttttttttttggagggatgagattgtagttgggttggggaaagttgttggtttaagttggggttggtttagttggtgttggtttgttaggttgttagagagttttatttagggagaaattaatattataaagttgggggataagagaaggtttggaattttaagggttggttgttgaggttagttgtttatttttttgtgttttattttatagggatttaggtttgttagtgttttgtttttggaaggaatgttgtgggttgttgtgttttataggtagggtggagggtttttttgtagttagtgagttgttttttttgtagtgtgtagagggaaggaggaggtttgtttattttttttggttttagttgaaaatttaattataggttttggtattaggtagatttgtttatttttatattattattgtagagtgagttaggttttttgggtggggttgtgatgagtaggaaggatttttggagtgtttgggattttttgggtttagggttgttagaggtagagagaaagaagtttttttttaatatttgagtaaagatagttattagaatttattagagtggttttttgtggtttttttttgggtgttgatttttttggtgtatttgaagtttttagggatattattgatgttttttgtatttttatttaggggttagtggaaatggttttttttttttttgtttagaggtattgtggatgatgattttaggttttagattttagttattgggttatgtgtgtagataagtttgggtagttagtaatttttggttattaagttggttttttgtggattgggttggtattggaggtgggttttagttgttagtattgtggtttagttaggtttggttttgggaaggtagagggggaggggattgggaaagggattgagttgggggtggggtggtattttggttttttttttttagatttttggtaggtttgaattatttggttgtggttttttaaggagggagtgttttttttgttttgatgtggattttgttttttgtttatgttgtttttgtttttaaataaatgtggttttttgtggggagtttgggggttgttttttattgatattgttgttttttggtttttttttgtaggttttgtttagttttattgtgtttatttttaagtttttttttttggatggttttgttttttgagaatatatttttttttattattttaattgtgtttttttttttatttggagtttgttttatttgttttaggagttattttttttttttattaagtagtttaggttaattttggagggttaatttgtgtttttttagaagtaggttttgagatagggattttagtgggaggggatattaggggatgtttgagtgtgggaatgggttaggtagggaatttagttaataaagggtgttttattagtttattgtgattataggtggttgtttagtttttatattgggtagtatggggagattgtagattgtgtttttagttttgttttatttggggttgggtaagggagttggggtttttatattttagtttttggttaaggattgtattgtttattttttttagttttttgagggtttgggtattaggaaaggttttgggtggagatatggaaataggttatgtgaagttagtgggtgtgattggtagtagtaaggttaggatagttttggttattagtaaggtgattatatattttagtatgtatagtttttatagatatatatttaggagatggtaattatattagtaatagttatttttgttgtgtgttatgtttgtatttagggaattttattttttatttatttatttatttttatttgagatggagttgtgtttttgttgtttaggatagagtgtaatggtataattttggtttattataatttttgttttttgggtttaagttattttgttttagttttttgagtagttgggattataggtatgtattattatgtttgattatttttgtatttttagtagagatggggtttttttattttggttaggttggttttgaatttttgattttaggtgatttatttattttagttttttaaagtgttaggattataggtatgagttattgtgtttggttttaggggtattttattattttattattttttatagtaggtgatattgaggatattgaggtttagagtagattgtggttatgttatttttttgtttggtttttttgtttttagttttgaaataaagagtatggtttttgtgtaggtttatatgttttgtttttagttttggagtagtttttaagttttttgaaggtatattaggtttttgggttttgttttttaagttttggataaataggaggtgaaggagtttttgtaattggattttattttgttagtgttaaggttttgtttgattatttattttattttatatagattagggatttgtgttaaggtttagtgttataggagagtgaagataaggaggtgtttatggtgtatatgttgttggatttattttgtagattttaagggttatggggagttatttgttaggtgaggtttttttgtggtttttttttgtaggtttagggtagtatatagggaggtgtttttttattttttggtattatttgtttggtttttttgagttttgattttggtttttagatagttagtgtttttttagggatagaatttgttttgttgttgtttagaggagatttagtttgattagggttagtgtttttggaatttgagtttggaattttattttgttttgggtagaggttatgttgtttttttttatgagagttgagttgtgtatgagattattttgattttgggttttattatttttttgtatgatatttgttttaggttggagtagggttttgtggtttgtttggtgttttttttttagattgaggtttgatatgtatattaggaagtgtttgatttggttttaggagttgggagtggtttgttaggtagtttgtggttagagtaggggttttaataatggttttttgtgtggtatatttttttttaaataggtttaggtttaggttgtttttgttttgattttgttatgggtttggaggggaaagtttgtatttggagggtggtttattgtggtttttttttgtgtagtagttgagattgtaggtgtttgagaataggagaagttttgtgtttattttgggttgtgagatgtttttttagaggtggggatggggatgggttagtatgtagttatttatattttttagtttgttggtattaaggtttgtgtatgtgtgtgtttttttttttttaattttgtttttttaatatggagttttgttatttgtttaggttggttttggatttttggtttaagtgattttttagttttaggtttttaaagtgttgggattataggtgtgagttattatgtttagttagtattaaggtgtgttttttaagagtaatattggttgggtgtagtggtttatgtttgtaattgtagtattttgggaggttgaggtaggtggattatgaggttagtagattgagattattttggttaatatggtgaaattgtgtttttattaaaaatataaaaaaattagttagatgtggtggttgggtatttgtagttttagttatttgggaggttgaggtaggagaatggtgtgaatttgggaggtggagtttgtggtgagttgagattgtgttattgtattttagtttgggtgatagagtgagattgttttaaaaaaaaaaaaaaaaaagaataatattgatggttttattttttgaatatgttaagtgatttttatgtagtataagtattttagaaggtaggaaaatgtaatgaataatatttattgttatttattttatttagagattgttattttttgtttgggtgtgagtgtgtgtgtgtgtgtaaattgtatatgtgtgtatgaaatggaattaggatttttgtatatattttgtgttttgttatttttatttaatatttttggtattttttatttttaaaaatgtgattttaatgatggtgtaggtttttgatatatgggtttagaaaatttgtggaaatttggattgtttttaggttttgttagtttaatgttgatgtaaatgtttttgtatgtaaatttttttgtatttttgattatttttttgggataaatttttagaagtgggttaaagtatatgaatggtttttaggtttttggagtaagttgagattggtggggattggagaagggatttagggaggtttttgggagtttgtgagattggagtttggttttaggggatttgaatttatagatgaaggagatggttggtaaaggtgggaattttttgttttatgggtgggggggtgatattgttttattttttagtgatagtatggggatttttttaatatgatttggttttgtatttttttgatattgtgtatggtttatagttgtgatgtttagttgggagttttttttgtgttttttagttgtattaattttttgtagatagaggaggaagttgtttggtgtttttttttgttgtgtgggttttttgaatttgtttagttgggtttgtggatttgtgtagttatgtatggggttttaaaatttgtaaaatgataagtttatgaatatttttgtttttgtgggtgaatgtggatattttttggttgtgtttttttttatagggaagatggagatgtgtaaagtgataaggatttgttatttttgggtaggttatgttggttttattgtgaggatggtggtagggggttttttaggaggtttgtatattgggaagagaggggtgattgtgtgtgattgtaggatttagggtgtagttttaggattttgatgggggaggagatgttggggagttttgttttgttagtttggtgatagatattttttaatgttttttggttgggtataatttataatgttttttgtggggaggtaattgtttatgaggtatttttggtagggatgattttgttttattgttatatattttagtaatgaaataagaatttagagtgatgtgatttttttgatgatttttttaattatttggggtttttgtgtgattttaagaagggggaaggaggtagtttttgtttttttgggtttttgatgtggtagttttggaatggttatgtgtttgttggtttatagtgggttatttgttgaatgtggttgtggtgggattggggttgggttggagagtgggtgattatattagttagttttattttgggttattgtgtagttaggggttttatttttttaggggttttgttgtgagtgttttggggttgttggaataaattattggaaattaagtggtttaataaagattgatttgtttatggttttggaggttataagtttgatattaaggtattggtaggattatattttttttgatagtttgaggggaggatttttttttgttttttttagtttgtgttggtttaggtgttttttggttttggtagtatttgtagtttttgtttttattatgtagttttttttattgtgtttttttgtgttttaagtttttttttgttttttttttataaggatattgagtattggatttagagtttattttaaatttaggatagttttattttgggatttttaattatatttgtaaagattttttttttaaataaggttatatttgtgggtttttggggttaggtattagatatgtttttttgggggttattagttaattttttatagaattttagatgaaagtgaatttttataggttgaaatgggggtgaaggtttagtgtgttttttttttttgggagtttttttagggtttgtgtttattttgtgattttgtgatttagttttttttttgagatgaagttttgttttgttgtttaggttggagtattgtggtatgatttgggtttattgtaatttttgttttttgaatttaagtgatttttttgttttagttttttaagtagttgggattataggtgtttatttttatgtttagttaattttttgtgtttttagtagagatagggttttattatgttggttaggttggttttgaatttttgattttaggtgatttgtttgttttgggtttgttttggttttttaaagtgttgggattataggtatgagttattatgtttggtatttagtaggttttggttgttttttttttttgagatagagttttattttgttatttaggttggagtgtagtggtgtgattatggtttattgtagttttgattttttggttttaagtgatttttttattttagttttttgagtagttgggattataggtatatgttattatttttggttaatttttgtattgtttagtggagttggggttttgttatgttgtttaggtttgttttgaatttttgggtttaagtgatttgtttattttggttttttaaagtgttggggttataggtgtgagttattatgtttggtttagtaggttttttagaagtgtttgaggtttggtgaaggtatggtgttatggagtagagaatatttaattttgtttttggggagttggaatatattttttgtagttaattttaatagttatgatgtggttaggatgatatggggagggggtggtgtggattgtgtgggaggttagttttttgggaagggggttggagtgggtttggttttgaggaggatttttaagaggaggaggaggtggtggtatgtttgtttggggggatggtgtgagttagggtgggtatttttttatttaggtgttatttttttgatattttagttgggatatggtttttttggggaagatggatatttttagagtggggtattttttggggaagatggatatttttggaatggggtgttttttgtttttattgtttttttagtatatagttgtatttttttgtagttttggaggttgtgagattttttggttgttatttagaataaatttgtttttgagtagtgttgttttgatggtggggtggtttttgtgggtggaatagtttttgttgttttagagtttattgagagttagtgggtatgggagtggtgttggattgaaatatttagagggattatagagttaggtagtaagtatagaggttagttagtggggagggagggatttatttatgaaaagatattaagtattgaaagagaggagaggatggttggggattggtatatatgtgtattttgtgtagatggttaaggtggtgaggtgttagttatgtagataattggaggaaggaggagtgttttaggggaggggttagttttggttttagaatgatttgtttgtgtatgtgggtttggttggaataaattattgtatttgtattgtagatttaattgtaagtttatattagggtagtttttgttttggtgtagtgtttttgattatgagttggttatggtgggggtgattttaaggggatttttaaggagggggtttattggattttttagggaaggttatttgtttttttgggttggatttgggataaggtttttttttgtttagtttttgttttttaatttgattgtatggaaggatgttgaggatatttggaagttggtttttgttttatagtatttataggatagaggtatattatgtggggatagtttggatagtgtttaggaggtagggagtagattagaggattgtgggaggttttgggaattgtatgaggatttaggtattgagttttgtattttttggtattagtttgatgtatagtttggttttgtgtttattttgtattttattttttttatttgtatgggggtggtaataatattttttatagtttaggtttaagtgggtgtagatgtgatgagtttggtaagtttattttattatatttagttttgggtattgaattttggattttttggttggtagaagtggatatttaatttttttttggggttttggggtttttgtagaattagaatatagttagtagtttgtatgtagggtgtagagggatagagggatattatgttgggagtttatatttggtatatttttgattttggggtttagtgttttgttgttttgtggttatgtgattagttagaggttatggttggatttataggtgaatatagtttgtggatttgattttgtttggttttgtggtgttttattttatttttagttttagtttgtggagatagagttttgttttgttagttaggttgagtgtagtgatatgattttagttttgtaatttttgttttttgggtttaagtgatttttttgttttagttttttgagtagttgggattataggtgagtgttattatgtttagttaattttttatttttagtaaagatggggttttattatattagttaggttgtttagtgttttaaaaagggtttgttttgttttgtgttagtatttaaagattaggagatattatataaagatttagatttttatttttttgagaagtgaatagttttggttatgttgggtttatattttttagggtagtgatggagttgagatagggtttgtgataattgagagttttttggagtttatatggttttttgtttagtttttggtggaggttgagtttagtgatttaggattttgtttgtgtttattaagaaggagaggtgtttgtggtttagagagggtgtttataggagtgttttgtttaggaagttggtagttgaggtggttagggttagggggttgggttttttttttttttttttagtgtttgagtgtatttggaggaagagagatgggtgaggggaaggtattgaaattggttttggagtgttattattgggggttggggattagttgttatttttttttttgtgggtaggggaggtagtggtgggattttatgagatttggattttgtggtttggtgaggtagggagtggttggggagatattgtgggtttttataggggtgtgttgtgggtttggtttggggaaggagttggtgaatgtgtttgttatgtgggtttttttttgttttggttttgataattaggagtggttggtttttatttggagtgtggttgtggggattgtggaggtggtagttttttaggtattatttttattgtttttgagggagtagattttggtggagaggtaggatggttgtagggtgggagttggtggttggtattattgtatgggtttgtagtagtggatgggaagatgtaggagaggttgatgattgagaaagttggtttttgtggattaagttgggggagttggataattaagtggttagaattttgggttttggtattagtttgatgtatagtttggttttgtgtttattttgtgttttattttttttatttgtattgggggtattggtattttttatattttagggttaagtggttgtagatgtgatgagtttggtaggtttggtgttttgttggtattgaaagttttagtgtttgtttttagtgttattgatggggttttgtttttgttgtggttttgattggttatagttgtggttatttattattggaggtatgttttttgttgtggttgatggtagaggtgtgtttgttggtggtgttttagtgtgtgttttggttggaggtgaggagggataaaaatagttgtgataagaaggaaattaaggttgggtatggtggtgtatgtttgtaattttagtattttgggaggttgaggtgggtggattgtttgaggttaggagtttgagattagattgattaatatggtgaaattttatttttattaaaaatataaaaattagttaggtatggtggtttgtgtttataattttagttattggggaggttgaggtaggagaattgtttgaatttgggaggtgttgttgtattttagttagggtaatagagtaagattttattttaaaaaaaaaaagaaggaaataaaagttttttttggaattagaatgtttttatgtagatgtagttggagggggaggttgtgtggtttgtgttgtggttatggtaagatatgatgggtagtatttttttattttagtttgtatttttgttttagaatttatgatggtttttttaggatggggttgttttttttgtttgttgagatatgaaggatgggaagagatttttggtttttattgttgtattgtttgtttttttttgttgttttttagtaggaaatatgttggagtgttttttagttatttatttattaattgtattttttttttttattttttagttttgaaaagattttttgaggttgaggaggttgagatatttaattttattttattttggagggtttagatttttttattttgagttattgtggttagttttatttagaaattttaggatttgggtgtgaagaatttagaatttttggtttgttatgtggattttttaagttaatgtttttttaaggtgtttttgtggagggtggagtttttgggttttaaggtggttgagttggtgttttggtgtattgagttgtttattgatattttgtttaagtaggtggagaatgttggggttattggtttgttttggtttgggtttaagagggttgaggtgttgggttataagatgttagaattggttttttggaggatggagattattattgttaaattttaggagttagtttattggaggatggagttttttgtttttaaggtttttgaggtgtttattgtttttgttattgatgtagtttttaagagggtggagatttagatgtttaagtttgttgaggtgtttattgtttttagtttagtttagattttggagaatttagagtttgtttttgtgttttagttgtagagtaggttggagtttaagttttagttttttgtggttgaggttatattttggagttaggagggtgagttgtagagtgttaggttttggatgttgtggtaatggggggtttggttgttggttttgttatagaattttggaggaagaagttggatatggggtggagggtgttattttggagatttagaaagattggaatgtatgggggtgggggtttgtaagtttaggagaggtggttttttttgtttgatgggaatatgttaagatgttttaagtgggatttgaatgagagtttggaaagattttttgggttttaaggagttttttttatgggttattgtgggttttgttgggatttttgtttgttgtgtgtttttggagggtttgggaggtttagagaatgaggagttatgtaggaattagggtaggtttatgtaggggtgtaggatagggtggagttgagatttttagaagggttgttatattttggtggtttttgtttgaggaattgtaggttgtttggatatgtttagtagaggttgagggtttggggaagggaggagggatgtatgttttttgaggtttgtattggagtttatggtttggttttttttttttaggagggatggttgtggtagagggaggggaatatgaggagtattttagtttgtaggataaaatttttagggtattgggaaggggtgtttggattagggggttgtgtgatagttgtatatggttttatttgggggtgtttttttggtgagaggagagaggttatggggttttagtagtgttttgggagggtttaagtttatagttgtgttgatatggagtttataggtaggggattggtgttagttttgtgggatatagggtttgtttggaaatgttaggttgtgggatatggttgggtttttttttagaagtgtgttttttggttttagtagggattgtggttttatggggttatagtaaggtgttagttgggttagaagttttttaagagttaggtttgattttgggtataggattagaatttagtaatgtttagtaagttttttttaggttggataaatagtatagtttgggtttttgatttagttgttgttttttatttttaattgtggtgaaatatataatatataatgtgtaattttagttattttgtagtgtatgttttagtggtatttagtatatttatggtgttgtgtagttgttattgttgtttatttttggtattttttttatttttttaaattgagttttgtttttgttagattaagttttttatgttttttttttagttgttggtagttattattttattttttgtttttattatgaatttatttgattattttaggaattttgtgtgtgtggaaaaatataataattgtttattttgtgtttggtttattttatttagtatgatgttttaaaggtttatttgttgtgttgtagtatggggtagaatttttttttttttagaggttgaataatattttgttgtgtgatgtatttgtgttgtgtagttgtttttttattggtggatttttgggttgtttttatatttttttaagtttttttttttattttttttgatttttttttgatttttttgagatagggttttgttttgttttttaggttggtgtgtagtggtgtgattattgtttattgtaatttttgttttttgggtttaagtgattttttagttttagttttttaagtatttaggattataggttgtgtgttattatgtttggttaatttttaaattttttttgtagagataggtttttattaggttgtttaggttggttttaaatttttgggtttaaatgagttttttgttttggttttttaaagtgttgggattataggtatgagttatttaatttttttttggtttttttttttgaatgagagttttttagtggttagtgggtttgggggttgggaggatgtggggtttggagagggtgtgggtttggggggagattagtgttttttatgtttttatgggtatgtggagtgtatatttgttttggtgggtttggggtttgggattttgtattttttatagagggggtattggaatatattgagtagttagaggttagtgggttttggaaggttttttttggtttttagtgtgtgagttttgtgtttttttttttatttttttaagtttgattttgaagagttattttgttttagttatttagatttagtgatagtggttgttggtggtatggtgttaggttaaaggtatgggtagtttgtagagtggtaggaggttgtttttttttttgttttttgttggtgtaggatttttgtttgatgtgttggatatatttttattttgggttgatgtgtttatatttagttgagttaaataggatgtggttggggaggtggttgttattgagttatttaaattttggtgatggttggtgttggatgtatagggatgtggttttggttttgggggataggtagggggatgtttatggggatgtataagaatatttttttttaggggtagatatagtttagtttttaaattgtgttagagattgtgttgggagttaggtttagggatataatttgtgggttttgttttttggagtttattgagttgtgagtaggatggttgggatataaggagtgtttagggagtttttttagtagtggaagtataattttattaggttaggaaggggagagaaaggtaggttatgtggaggtagtagtgtttagagttgttaggaatttggtgttttggggggatggtggttttttttatggaataggatgtatatgttggagttggggtatgggagaaaattattagtattttagatttggttatttatggatagggatttgtgtaggtgggagtttagtttatgtggagaggtttgtgggttgggttgatagttttgagggtttaagtaagtttaggtggaggaaatgtagggatagatgagggtagggtttttttaatggaggagtgtttttgaaatttgatgggagtggttttttggggggtttaggtttgagttttattagttttttttttgaggtattatttgtttgtttttttgttttttttttttgtgttatgattgttttggatatggatttagttttttttaatttagttttttgtttattttttttttaggtttatttttttttgtttttttatgtggggttgggttgggagttttttgagttttgatatgtatagttttgattaatttttgtggtttttttgttttttgagtattagggatttagttggtattatggggaaaggaattatggagggagttttgtgttttttgagtagatgtttagttttttggtttttgtttgtgggagggtatttgtgttgtggtttgtttttattttagagttgtgggtgtagggtagggttttttggggttttagttgaattgtttttagattgatttttttaaagtatagtattgttgagatttttttttgtgttgagttttttttgtttatttattataggtttttttatggttgatttatttttttgtttagtttatattttttttttttttagttttttttgttttggtttttttttggttttttatatttttttttataatttttttgttttgattttttgaattttgatttttgtttttttttatattattgttttggtgaatttttatgtattttttaaaatttggtttaaatattttgtgtttggtttgggatataaatgatttgtgtataaatttttttttttttgttagatttttttttttaaatgtgaaagtagttttttagattataaaaagtaattgagtattttttttttaaaatgtaggaagtatagaaatgagaaagaatttaaaatttatttgtaagttagtgatatttatgtttgaggttttgttgtatagtttttaaaattttttttatgtttttattagattttgagggtagggttgttgtttttgtttttttttgtgttttttttttgttttttgttttttgagatggagtttttttttattatttaggttggagtgtagtggtatgattttagtttattgtaatttttgttttttaggtttaagtgatttttttgttttagttttttgagtagttgggattataggtgtgggttattatgtttggttaatttttgtatttttagtagagatggggttttattatataggttaggttggttttgaatttttgattttgtgatttatttattttagtttttttgattttttaaagtgttgggattatgttattgtgtttagtttgttttggtttttataaagaattttataaggggttaggtgtagtggtttatgtttgtaaatttagtattttggaggttgaagtaggtagattgtttgagtttaggagtttgggattagtttgggtaatatagagaaattttatttttataaaaaatataaaaaattagttaggtatgatagtatgtgtttgtagttttagttattggggaggttgaggtgggaggattatttaagtatgggaggttgaggttgtggtgagttgagattgtgttattgtattttagtttaggagatagagtgagattttgttttaaaaaaaaaaaaaaaaaaaaaaaaaattttataagatattaagtaagtgatttggatataataggtgtgttatgaaattatgttgaaggagtgagttattggtggtgagttgggatggtttttttgtggtttttgtaggtagatgtagtgatttttatgggttgtttttagagattaagtagaaatttttttggttaattttatttttaggatatttggttttttttttggaggttgtgttggagggtttagtgggtgggtgttggttttagtgtgggggttttggaaggagttagtattttaggagggagtgtgggtatttagatggttgaaggggagggagaggaagagaggtgttgtagagggtagaggtatttttgtttgtttttttgttttagggtttggtgaggtttgagttttatgttggtggggtggatttttggtttttgaggttttggttttgtttttggatttggtattttttttgttgtttttttatagaagggtgtttattttttggggttatttttggtttttttaggttttgggtggggatggttttgtttttttttttggatttttgttttttttttgttttttaatatgggtgtttttgggtggagtggggtggggttgggttgtagtatttagtattgagtttgtaagggttggttgttggtttagagttttttttattagagttatttttttttggttttttagttatattagttaagtttttttagagttgttttataaggtgggtgtttagtgtttgtttatgggtttggttttttgtttttttgggatgtttattgggggtaagagggaggttaggtttagtgtttagtttagttttgggtatgttttagttttgttttatgagttaattggttttgaattattattttattttttttagttttaattttttgatttgttaaagaggtatttgtagaggtggttgggggttgagtttttatgtatttatttattttaagaattaagaagggagtttatagtggttttggggttatttgtgaatatggatgtgaaattggggtggggtagatatggtagtatgttttagtagtttttttgtgatttagagggtttggaaatttttgttatgtgggtggagtgttgagggagtagggggttaggtttttttgagttgatgatggtgggtgtggttttttgtatatttggtttgtattgggttgtgtgttttaggggtagaatagggaggaattttagtatagatagtagggttgttagtatagtgttgagtatagggttaattaaagtatagggttttttggaattatttaatatagagtagtgaagaggtggttttggggaaagtggggttagagttgagtttgagtggggggtggggagggtgggtattagtttgtaagggagggatatttattgggttttagaagtttttggtggggattagggattgtgaagttggggagagggtgattattgtgatttagggaggaagggttttatagatagtttagtttttggttttgtgtttataggatattttatataggttttgagtttatttttggattgtggattttttgaggtagggtgtgtaggtttgtttagtattaggtgtaaggtagggggttttggtaagtgttgagggatttattggtgtttgatgaagtagtgagtttggattgtgttatgttttgggttttgagtttgtaggatttttttgtggggttgtgtgtttttgtttttggaggtgtttagaaggtattgatgtttttgttgggatgttttatttggaaggttttgttgtttttatttttttttatttttttgagttgtttgtagagggtatttaggtttttttttattttgggattgggtttttttttttttttttttttaagaataagtattttttttttttgaattgtttttggagttttttagatttaggtttagagtgggaagttttgtatgtgttgggggaataggaattaatgtgggaggattggttaggtttggtgtgttttttttgtggtgggatggggtggggttagagaatagagtttggttttagagtttaggaagagaatttttttttttgttggtttgttaagtattgtgtagtggtgagaggaaaggagggttggtttgggaatgtagtgggtgttgagtagttgtggaatattttaaatagagtgtagttgtggggaagggtggggttaggaggtaggtgttgggggtggtttttttgttttgttttttgtagttttgtggttttgattatttagtttggttttaggatggagttttggtttttagatatatggtattgggtgaggttgttttttagtatttgttttaggaagttagagtagttgttagaagagagaggagttgtgtttgtatttgttgttttttaggtttgggatagttgttgggattgagggtttgtataatggtgagtttgtttggaggggtgtgttgtggttagatagttatgttttgtgtggtgtggatagagggtatatttagttttggaggagtgtatttagattttttgttttggggtttaaagtgtgggtagtttttaattagattttggattttagtagatagtttgggaggatgttatgtggtttattttgatatattgttttatttgtgattttatttttgagagttgtagggaggtgtttttttagttggattttattttttttttggggttttttgtgggtgttataagtgattttgttttttttagtttaaggggggtttttggggtatgggttgtaattgataggttagagtagtttatggttagggttgagttttttttttgttttttttgaatattgggtttaggaaggggttaaagtggagatgttttgattaaagttgagggaggtatggagtttttttgattttgtttttttattttattgttgttattgggtgtattttgtggagttttaggatttttaaagaatttagagtggagatttttggttttatttagtgtaggtgagggggaaagtgatttgtttatagttatatggttattattagtatatttgggttaagtttgattttattttatggtttttgtttgaaatttggaattggaaatggttttggaaattattgattttatttgttgttttttaaaatggtttgtagaggttaagatatagatttttgtaatgttttgtttatttgtgtgtggggaaatggtagaggagtattggttttgtttttatattgtttgggttgttgtttttgttttgtttagtggtttttttttttggtttgtttttttattgtggaagtgggtataattttttttgtgtagtgtggttagagtggatagtgatgatttgtgaagtagggtggagtgtttgggggatttgtgttaaataagtatataaataaaagttaatataatttttatttaattagtaagtaggttttgtttgaagtttttgggtagtattttatgttatttttaggttttaggttggtggtgttgttttgtgttttttttatttgtaagttggtgtttagaagttttgttttgtgttttggtttttattttttttgtgatttttttttttttttattttaaaaagtaatgtatgatggggtgtggtggtgggtatttgtagttttagttgtttgggaggttgaggtaggagaattatttgaatttaggaggtggaggttgtagtgagttgagattgtgttagtgtagtttagtttgggtaatagaataagatttttatttgggaaaaaaaaaaaaaagtgatgtttagttatttttagatagaaaatgaagattatatgaaatttggaaagaagttttttttttttattttttaatttttttttaaggggtggttatgttgatagttgggtgtggtatttttttgaattttatttttgtagagttatttagggtttgtgtaaaaaaagttaatgtgtaaatatagattttttaagaatataaaggaaattagatttttgttattagtttttattttttttatttaataatattgttgttatttgtagatgtagtatgtttttttttttttttttttttttttttttttgatagagtgtggtttaggttggagtgtagtggtgtgattttagtttattgtggtttattgtaatttttattttttgttttttgtttttaagtgatttttttgttttagttttttaagtagttgaaattataggtgtttgttattatatttggttaatttttgtatttttagtagagatggggttttattatgttggttaggttgtttttgaatttttgattttgagatttgtttattttggttttttaaagtagtatgttttttttaatggttgtgttattagttgttttatggttttgttaggtttgtttagttttttattgtgattgagaggttgtaatagatgtttttgtatttgtatatgtgtatatatgattgaaggatgagtttttagtgaatttttgtgttaaggatgtgtgtatttaagttttgatttgttgggtatagtggtttatatttgtaattttagtattttgggaggttaaggtgggttgattatttgaggttaggagtttaagattagtttggttaatatggtgaaattttatttttattaaaaatataaaaattagttgggtatggtggtttgtgtttgtagttttagttatttaggaggttaaggtaggagatttgtttgaatttagtaggtagaggttgtagtgagttaagattgtgttattgtattttagtttgggtgatagagtgagattttttattaaaaaaaaaaaaaaaaaaaaaaaattgatttttgtttttgaattggtttttaaagtggttattagaattttttaggatttttttttttgttgatttgtttagttgtttgttgggttttgtgtagtgatggtttagtagggaggttttatgttttttatttttggttgagggttaaatgttttttaattggtgttttattttgtgtattttggttaagtgagagggattatttttttgtatgttataggttagggttttgtgttttttttttatttggaaggtgtattttttttttgttgaaattttttaaaaagagttttttgtaagttaggtgtgatggttaatatttataattttagtattttgggaggttgaagtgggtggattgtttgagtttaggagtttgagattagtttaggtaatatggtaaaattgtatttttgtaaaaattagttgggtgaggtggtgtgtttgtagttttggttatttgggaggttgatgtgggaggattatttgagtttgggagtttgaggttgttgtgagttgtggttatattattgtattttagtttgggtgatagagtgagattttgtttaaaaaaaaaaaagagttatttgtatatttttattatagtaggtatgagtattttgtttttagttgtttatttttgattttgtttttgggatgtttttttatatagaatattttaattttgatattgttaagtttttgtttttttttttagtttttggaatttatattttgtttagaggttttttgtgttttgaaattataggaaagaattttatttatgtttttttttagtatttttgtggttttatttttatatgttgaaattatgaatttattggaatgtattttggttttagtagtgaggtaggggtagatggtattgtttggatatatagtagtgagtttggtttggagtgggtggggtgtgtgtgtgtgtgtgtgtgtgtgtgtgtgtgtgtgttatttttattagttttggtgtttgtattgtgttggtttagtaaaaataatttggatgtattttttttattttttgttttttggaatattttaagtagtaatataataatttttttgttaaaattttttaagaatttatttgtgaaattatttgagtttgatatttttgggggagtttagtattttaaaaatttaaattttttttatgggtttgtgagtttgggagtttttttttttttttaaaatttattattattttttttttagaaaagtgttttttagtttatttaaaatttgttagtttattttgagggggttgttttagtttgtttagtgaggatagtgtgtagtgtggtgattgatatgattgattagtagagtatgattgattagttggtgtgtaaatatgattgattgtggttagtgttttgggatgttttatgttgaggtatatgtgtgtagtgtagggtgatgtgtattttgagaggggatgaagttataggatttttgtatttttaggagagagtttttttttttaaggttgtagttttgagtaggtagtgatgggattgggtttagggggttgagtggttttagtaggttaagggttttaggaattatgagaagtttggagttgtttagagagtagtttttaaaattagtttggattgtagtttttagaaagatatgtgattgatattatgaattaggatatatttatatatggggtgggggtggggatgggatgtattaatgaaattaaatttttgtgatggaatttttatttttattatgtgtgtgttatatttagtatttttttttttttttttttttttttttttttttttttttttttttgtttgtttgttttggagagagggaaggtttttttttatttttttttaaatagttttattgagatttaagtaagttattatataatttattaatttatttatttatttatttttttgagatggagttttatttttgttgtttaggttggagtgtagtggtgttattttggttgattgtaatttttgttttttgggtttaattaatttttttgttttagttttttgagtagttgagattatagatatgtattattatgtttggttaattttgtatttttagtagagatggggtttttttatgttgaggttggttttgaatttttgattttaggtgatttatttgttttagttttttaaagtgttgggattataggtatgagttattgtgtggtttaatttatttatttaaagtgtataattttatggtttttagtttatttagagagtagtgtaattattgttattataattaattttagaaaattgaaaatttgagaaatttagaaaattttttttttaagaagaaattttgtagtttttagttattaattttgttttttttttttatattttttttttatttgtgtggattttttttttttttttttttttttttgagatagggttttattttgttatttaggttggggtgtaatggtttaatttttgtttattgtaatttttattttttaggtttaagttatttttttattatggttttttgagtagttgagattataggtttgtgttattatgtttggttaatttttgtattttttgtagagatggggttttattatgttgtttaggttggttttgaatttttgggtttaaatgatttttttgttttggttttttaaagttttggaattataggtgtgagttattgtgtttggttgattttagatattttttgtatagagaattgtatgtttggtttttgtgtttggtttttttatttggtgttatgtttttaaggtttatttatattgtggtaggtgttagtgtgtttttgagtaatattttattatggtatggattattttattgtggatagatatgttgtttttattagttgagggatattgggttgttgttattgttggtgagtgtattttttttaaattaaaaaaaaaatgttggttattatttattagattgtttttttggtttatagggtgggataagttggtttgggtgagggttaggaggtggttaggtggaggtggttggagtggttttgggttgtttttgggtgtagtaggtagaggtgtaatggtagagtttgagtaggttttttgggtggatttttatgttggtaatgtttgtttatttaagaagttttggttaggtgtggtgttttatatttgtaattttagtattttgggaagttgaggtaggtagattatttgaggttaggagtttgagattagtttggttaatatggtaaaattttgtttttattaaaaatataaaaattagttgggtgtggtggtgtgtatttgtagttttagttatttggtaggttgaggtaggagaatttgtttgattttaggaggtagagtttgaatttaggaggtggaggttgtagtgagttaaaattgtgttattgtattttagtttgggtgatagagtgagattatgttttaaaaaaaaaaaaaaaaagaaaaaaaaagaaatttttagtgttgttttgtgtttggtattgaagttgagggaaggtagtattagtatgagtttttagtttattgggtttttgtttggagttgatgtgtgattaaggtatatgagggaagtatggtgaggtggatggtgtggaggtataaggagtaaaataaggtagatgtagtggtttagtggtttttggtggttgtgaggagtgtgggtaggatagttttaggagggtatttggagagtagggttggttggggtaaggtgtgttaggtatttgttaggagtaaaatgtaaggggatattaaagagtttaggaattaatatagatagtatttaatgtagtattttttaatattgaaatgatgtatagtaatttttatgatgaataaatgttggaattttaaattaagataggtttagttttgtatgtgtatagttttgttagagtttgtttagtgtggaatttgatttgtttaaaatgttgttttaaaatattgtttgatttttggattttttggtattgttttaatttttgtatttggatgaaggttttattttaattttagttggagagggttaagggttggtgaatttggttttggatttgtagagtttgtggtatttgagaggtggggttaggaataggaaggagttggtgagaatggtatttggtatgggatggggttagattagagtagtattgtggttttttttaatttgtggttttgttgttggatgtttggtgttggtgttgagtttttggttttttgaatggagtgtgatgaataatggggttggggagtttttgggtttttttttgaagtagtagtgaagttagggatatgttggtagtaggtagggagagggatgtttggtttgtgtttggagttagttgttttatggaggagttgggtgaggatgtggtgggaggaagatttttttagttttgtattttttgaagtataattgagtgtttgtgtggtttgggggttattttggtttgaggatagttttgttttgtttagttaggttttgaagagttattgggatatggatagtagttttgttgggtggtaggttgtttatttttgtttatttaatgttggaattggatgtagagtatttggatggttagttttagagtgtttttgatatttttagttattttattttttagattaggataagatgtgggattttaattttgagttttttatgggttttattttatgtgtttttataagttattgggtttattttttggttttagggttgtttggttatttggtattttggtttttttatttgtataatgaaaataatagttttagtttttttgaggagttataagatgttttttgtgtgaaaaattgggatttggtattagattatttggatttgaattttggttttattttttttaatttgtggttttgggttaatttggtttttttgtttttagtttttttatttatagagttattttattgagttgttgggaggatgaatataaggaagtgtatttatgtgtttagagtattgtgattttatttattattattaaatgaggtatataataagtgtttaatagatgtttagtgttattttatggattttgtgtgttttgtgtgtttttagtagttaagttttggaggtggggaagttgttgatgagttgtatgaggtaattagaaagaggaggttataggtgtaagggtttgggtgatatttgtggatagagagaggttgatggattttggtagaggggaagggggtttttgtatatagaaaatgttttttgtatttaagatttttgtgattttggaatagaggtagtagaggtttgtaaattttaaattataaatttagaaagtatagaatatttgtagagaggattagaaatattatatattttagtgtgtatagaattttttatatagttaaataaaagtatgtttttaattgaagttgttggagagtttttgaggattttatattagataagggttggtaagtggaagtttaatatgtaggagttattttttttgtttataaatgtttgttgttttttttgtttatatttgtatttatgtgagggtatttataggtttattgtttagttttatgttttgtttgttattaaaaaattttttaagaattttttagttgtaaatttttttattggagggggggttttaggaatttagttttgtttggggttggggtattttagtatttgttgtataggtgttggttattaaaggttatgtgttgtatttgtgggtttttggggtttggtggtatttgggtatatagtttagtggtggttttttatttgttagatattgggagtggggggttttttatttttgttttttggtggtggggggagtgttttgagttgttatatattagaatttattgatttatatgttgtggtattttatagttttttgatagttttttagtttgagagattattaaattgagtttttggagagggtggttgttgaggtttggatataggtgtggataggatagttttgttttattttggagttttgttttggtttagttttttgtgggtttgaagtttaggttgggttagtttttgttttttagatggttggaaaggtagtttagttttatggtttttttgttaggttttgagagttgtttggtttttagttttgtttttttttttttttaagatggagttttattttgttgtttaggttggagtgtagtggtgttattttggtttattgtaatttttattttttgggtttaagtaatttttttgttttagttttttgagtagttgggattataggtgtgtgttattatggtaggttagtttttgtatttttagtagggattggtttttattatgttggttaggttggttttgaatttttgattttaagtgatttgtttattttggttttttaaagtgttgggattataggtgtgagttgttatgtttagtttttagttttgttttgatttttttttaaggttgtgaggatgtttatgtttttttttttttttatggtttattgatgtttttagatgttttgtaaagttattttttttttgggagttttttagttggtgatgggggattttttggggattattgtttaggtagttatgtaggtttgtgggttgtgtttttaggttggattgagatttggtgtatggggtgtttttggtttgagttgaggtttttggaagttatagttaggaggtagtaagggatggttgttatgtttttttttttttgttttttagggtttttgtgggatagatttttttgtttgagttttttggttgtttatattttggttttttaaagtttagtttgaagttttaggtattttataatttgttttttttagtagtttgttttgttttttttttgttgatgtttttgaaatttttttgtttttttttattttttggttagagagagattggagattttgtgggaatttttgaggggagggagaaggttgttgtttgaatggaggtggtttttttttttgtttttttttaggtgggttatatttgtaggtttagttttttgttgtggtagtgtttggggtgttggttgttttttgggtatgagttgggagttgagggaggtgtttttaggattggagtggtaatttagttggaggaggagtaataggtttgtggttagtagtagttgttgtagggattttggtgttgtatttgtgttttagttgattttttttgtttttttagggtgggttggggatggtggtttgttgtttagtttaggaagaagaggggttgtaattagtagtagttattttaggggattttagtgttgtatttgtgatttagttgattttttttttttttttagggttggttgggaatggtggtttgttgtttagtttaggaggaagaggggttgtggtttttattttagaggttttttttttggttttttttttggtgttggtttaattgtaggtttgttttaggttgtgttggtatttgttgattgatgtttagtggatgttgataggagagggttgggatggggaagtagtaagttttggttattgtgggtttgggttatagatggttgaggtattttttggttatttttaggaagtaaggttttatgtagtttttgatttatttattgtttgtgtgtattttaggaggttgtattttttaaggtttttattaggtaattttattgggttgggtgttgttgtaaaattatttattgggtgtggtggttttttggtggggggtatggttggggaggatgtggtggaggagaagttagttttgtggttggggggagggtggattatttgttttttgtttgttttttgaattggagtttatggttttttttttaggtgtttgggttatggaagaggttatagttttgttttatttttgtggtagtttaggggagttttggttagttttgtgttttttgggagggtgatagtttggttaggttgtagggtaggattggaatgtagatttttgtttggttatgttgttgtttggttgttttgtttggggattttttgtttaggaagagagaagtgggttggatagtttggtttagtgattggaagtttagttttttatgtttagtttagtaggaagtttgtttttttggaatatttgtgtgtttttgtatgtgtttttttggttggtggttttgtgaggtttttattgggttgtgttatgttttttggttattttggttttggtgtttggtttttgtgaaatagagatatttgggtagttttttatttgtgtttgtaagtttgtgtggttttagtgatggttgattttgttttatttagaggatttgggaatttttagtttaattgtttagaggagttttttttagtggggagagtttgagttgtttttttggtggatagttttttagattttaggtggatttttttgttggttgttttttttgttgtttttgtttttttgttttttatttgttttttatttttttttttgtagtagttagttggtatggggatttttttttttttttgggattgtgaatgagatgatttttttggtttttttgggtttagatttttttggtaatagttagtgaaatttttgttttaggtgggaggagaaggtttagtatgtggttataataatggttttaattatattatttttaaatgttggtttttatttattttttgttttgtttaatagttatttttattattttattttttagattaggaaattaaggtgtagagagttttagttatttgtttgaggtttttatagttaagtgtttggatttgaattttggagtagtttggttgttgagttgttttggagatggggtattgtgtagtggttggggtaggggtggagttttgttgttgttgatttttgggttatttggagtgataatatagtttagtgtttgggtttttgtttgagattttggttggatgttaggagtttgagattttttagtttttttttgtgtaaggtgttatggggtgaaatgaaagaaaattttagttagaaggtgtttttttttttttttagttttttagttgttttggattttgaaataagatattgtttgtttgtggggtgagtaggaatagattggaattgtatttttttttttttagttatagttgttaggagtttatttttttttgttttttttttttgttgtttttttttataagattgggttggatgttgttgggaaagttaataggaagttttttggttgtggtggaggtgggggtttgtgtttttttggggattgagatgagggttttaggttggttttggtaagagtagggaggtttatgtttttgtttgttggttttgttttttgttttgggagaaggtatttatatgttttagaatgtattttttgtgtgtatagggatggtttttgggttatttatttgaggtttattgatttttttttttggaattggagtggtttttttatggtggattgggttgagttttttgttttggttgatgtttttttttaggtatttttttttattgtgttagggtgtaggttgttagtggatgggtttttatttttggggattggtagttgttatgtttattttatagttgagatattttggttgaaggttttgttaagttttatggagtgtagggattttttttgagatggtttttttttgttgtttaggttggagtttaatggtttaatgttttgtttattgtgattttgattttttaggtttagtagtttttttattttagtttattaagtagttgggattataggtgtgtgttattatgtttggttaattttttaattttaatttttttttgtagaaatggagttttattatattttttaggttgaattttaatttttgggtttaaatgatttttttgttttggtttgttaaagtgttgggattttaggtatgagttattgtgtttagttggggtttttttttaattttttttggttttttttaggtgtaggatttgggttttagttttatgtgtttttgaatagttttgggttttgttttgtattttttgggtgtgtggttaggttttttgtgatattagtaggagatttaggtgaagaagtaggtagaatggaatgtttgtttatttagttttggggttaggtggggtggttaggatagtagtagtggttggtgtggttttttgggaggttagtttattggtgtggttagtgaatggggaggggagtttttttttttgtttttttttatttttggtttttgggtttttagggttaggtttttagagttttaggtggaggatggaggttagggaagttggggtaagagtgggttgggggtgggtggttaggtggattttggaaaattattttttgtaggttttgttttttttagggagtatttagggttggttttggggagttgggttaatggttattttggatggtgtaggggtttatttttatgaaattgggtttatttttatgaaattgggtttatagaagtttttggttttggttttgttttgttttttggtttttgtttttaaagtaggatttaggatagttttgaattttttgttgaaatgtagttttttgggttttaatttagttttttagaattagagtttttggggtgggttttttgtttgtttagtagtttttaggggatatttgtgtttgttagagtaagtttaataagtattgttgtaaattttttgtttttatagttttttggtttgtttttttttttttgttgggatttgtattaggattaaatgttaatattagggattaggttatatttgtgaattttgagataatatttgtattttttttttttttgaggttgttttgtttgttttgttatttaggttgaagtataatggtgtgatatttatttatggtaatttttatttttagggtttaagtaatttttttgttttagttttttgagtagttgggattataggtttatattattatatttggttaatttttgtatttttagtagagatggagttttattatgttggttaggttggttttgaatttttggttttaagtgatttgtttgttttagttttttaaagtgttgggattataggtgtgagttattgtgtttggtttgatatttatattttgattaagttgttgtggaaatattgagttttttttgatagttttgtttatagagtgaatgtttaggaattggtgaggtattttttatttttatttagatggtggtttggaggtagtgtttttgattttgtgatgggatttgttttttttgtttaagagattttagagatgtggtttttgaatgtgggggtttttgttggggtgggaatgggagttggttttggttattgtttagtgattttattttagtgttttgattttagtatttttgattttagtgtttttttttttttggttttgtgtggagattatgtggtttgtgttgagtaattttttattgtttttgttgtgtttttgttgtagggaagtttttttagggagttagttgatatatttggtttttattatttgtttttgaataggaatgaaaggagagagtgagtaagaaagtggtaggaggtgggggttgtagagtaggggaaggttagagagaggggaggaaagatttggaaagtttaggtatgtgttttggaagtaggtgttagtgatgagtttatttggagggtggttgtttgttttgagttttgtttggggttagtagggaatattttgttagggtatgttgttgggagtttgtttttggtttattttttgttgttttgagtgttgagtagatttgtttttattttagggataatgtaaggaggttgttattttattttttattttattaatattttatgaattataagtgattatttattgtgttttgatgtattttaggtgttgggtttgaagttttatgtgttttatgggatgtatttgtattattgttgtagaaaatggtttttgttattattgtagagaaggtattgaggtatagagaggttgaggaattggttttaggttatatagttagaagtggttgattttggttgtgaatatagggttgtttgattttaaagtttgagttggtttgtagtgaggtttatggtttttgtgttattgtttgagtttttggttgagttttttggtttagtggggggtttagtgatttattagttgttttattatatgttgtggatatttttatggtttatttgggtgggagggaaggggttttaggaggtgggaggggtatagggaatatagtttagtttgtttgggtttaatattttgatttttaaggtattttttgagggtagtatgaggttaagtttttgtttttttttaggattttgtttttgtgagggttttggggttttttgtttttttttgggggttttgttggttaggattatagagaagttttttgttgttgatttttttgtttttgtattttttggtaagttattttatgatttagttgttttgtttgtaaaatgggttgaataatattgttttgttttggagggtttttgggaggattaaatgagatttgttgtatagaagttttttgtaagttatgttgattggtggttgttgggtttttaagtgaatgggtatttgggtattgagtgtgtggatttagtatttggaaggaggggttggggggtatttagaatttttgggaggtttggatttttgttttgtttagattttgagtttttttttggttagtttaatttttattagtagggtgagggtaattaggatttatgtatagttgggtgaagttgagtgattatatgtggaagtttagtgttttttatgtaaagtgggtaggtggttaaagtgagttttgttttagtttttttatttttggggttgtttttggtgttttgtttttttttagagttttattgatttgtattatgtgatttgggtttgggaagatgggtttagttgtgggaggttgtgtgggttggggattgagagtgttggaggagggttttttaggaaaatttagttgtataggaagttgggttagtggtttttggaagtttttgggttttgtaagttggattttttagatttgtggttgtggggtttttttttgtttgtagttgagagtttttgatttgtatttgagggttttagaggtttgggagggggatgtgattgtgtttttagggtgaagtttatttgagtgttattttggatatagtttttatttttttttggttttttttttggttatggggatgttgtttggggggggtttttttatatggaaggagttgtagttgagttggtgggttttgtatatttttaaggttgtttgatttttagtttttaagtggggttgtatttattatttaggatttggagttttagttagagagggattttttattgtttttttttttgttttttgggaaaggtagggtttttgtgtttttttttatttagggatttggtatgttgggaggttaagaggaagttgttttttgtttatttattttttaatttttttagttagtagagttttatttgtgtgtttagaatttgtgtgtggagttagaagttataaggttggtttagttgtgtttgattttggttgtgtggttttggatagttttagtttttttggagttgagtattttgatttgtagaggagaggttgttgtgttggttttgtagggttttgtgtagaggggagtgtgtgtggttgtgagtttaggttatgtttttagattggaggataggattggaatagtgggttaggatggttagagggttttagttttaggaggaggtttttatattttttagtatttttatattaggaaatgtagttaggtttttaggttttttatgttaggaagtagtattttgttttttatttttggttgtttgggtttgagaagttgagtattttttttgaatttgagtgttttttgatttttgtttgggtagttgttttttttgaattgattgtttgttttatatagttttttgtggtttgtttgatagggtggttagtgagttttttgtatagtatattttttttaggagtgttgtttgtgatgatggtgtaaagggtgtttttttgagtttttggaggtatgtagtggtgtaatagtgtgagtttaggagttttggtgagtttttggatggagaatttgtttagattattttttagtttaaattttttttgggtgtttgttgtgtttggggtgttgatttattgtggggtggtttgtgagattttatgttatttggttattttttttagtttttgtttattgtattggttttttggtttggttgtttttggaatatgagggtttatttttatggaagaatatttatttgtttttttttggaaagtttttttttagattttttggttgttttatttaggttttgttgaagtgttgttattttggagaggtttttttgttatttgtagttaaaatagtttttttatgtttgtgggtggttttttatggggtatggatgagtattggagagttttgttgtttatttgtttatatgttttttgggagggtaggggatattgatttgtgttgtgggtgttttgtatgttatgggtgtttagtgaatgtttgttaagtattaggggagtataaaggagggaagtttttgtttaattggagtagttagggaagattttttggaggaagtggtatttggtttgtttagaatgtggtgatttgtttgtatgtagatattagattagagggtaaaggttattattataatttagtagatagttataagtagttaaggaattgttatgatatggattgtttgtgattggagttaagaaggagttagagatagaggtttttgtgttttggtgtgagtttttgggggaggttgagtttttagaatgtggggttgtttgtgtagaggttggaggtgggagatatatttgtgagtgttggtgagtgtggggtgagttattggggttggattagaagatgggaatttttaaatttattaattagttttggtgttttgggagtgataggagatggggtttttgggggattaatttagtataagtggatgagatgggatgtaggggaaaggataaagttttttgaggttttgggaagttgagttagggtagagttatgatagggtgagttttagaagtaatataagaaaaaatagttagattgggttttttttttattgtgggagatgttttattttattttttttgttttttgggttttggtaatgggttgggtatagtgaatgggttttatttgtaggagtggttatattttttgggtatagttgttttatatattgtattgagatgggatttgaggttgggaagaatagttttttttgtaggttgatattgttagtttttggggagggaaggatggtagggggtttggagtatttttttttgttatttatattttgtgtttgtttgtagggttttgagttttgtttgttttgttttagttttggttaggaatttgttggagtttataggggtagttaggttggaataggaggagattaggttggtaggggagttgagagggggttttggatagtatttagggttgagttattttgggtttgtttgatttgttatttggagttgtttttgtttgtttattatgtgtaaggttttgatttatttgggtttgtttaattagtgtttttttttaggtttagttagtttggtttttgtttgatttatttattgttattagtgttatttttgtattatgtaattagtttttgtagtatgttagttattaagtttagggttttttgtgtattttttgtaatttttatagtaatttgggaggtatagagaggttgagttgttggtttatagttatatagtaggtatggggtattgttaggatttagttggatttttgattttagggtttttttagggttttgggtgggatattggtaaggaagtaaggtatgaatattggttttgttttggatagagtttggggatggtggtttggtaggtttagttgatatagtgattttggtgtaggtttaattattggtaaagtgtttaagtatatatagaattttaattggggagataggtgaagtggttaagggagggttgtgagtgataggtggatattgtatttattggtagattagttgattttggtgttttttggagttttttaatttttttatttagaaaaagaggaattaatagttttatttttaaattgggtgggagtattatatttgaaattgaagtaaagttggttgtgttataggtttggtagatgttagttgtgtaggtaatttagtgattatttgaagtaggttgtgtggtggtatttttattttgtagatgtagtttagagaggttagggtattaattttgggttatatagtgatagtttaggttatagagagtagtgttggatgggagggtgttggtagttttaggtataggttgggagggttgtggggttagtagagggagggtatattttttagttggtggggtttttttgtgttttagtatttatgtgggtttaaaggagttggaaggagggaggttagagttatttatgggtttagaagttgataagtaggttattgattttgaatttgttttattgtatgtaaattggggataaatttggggatttaatgatataatgtaagaagtagatatgttatagttttggttatatagttagtgtataataagtggtaagttgttagaggaggtagttggtgagaatgggagtattttagtagttttttgttttttgtttttggttgtagatgtatttgtttttggttatttgtgttttagttttgtgttttttggtgtgtgtgaggttaagtttttggggtggggatttgggggtgtgtttgtagtttttgaggttaagattaaggttgaggttgaggttgaggttgaggttattttggtgaggaggaaattgtaggtggagaagtttgttgattgtgattttgatttgattgtaattttgatggtgttgatgttgttagtatgtaggttttttgtttttgttatgattggtttttgtagtttatttggttgagaggtgtgttggtttttgtaggttgtaaaatggggatattattgtttgtttgggttatagtgtgtttgttgattgtatttggggagggattgagggttgattgtgttgtggggatgttggtagagaattagagagggtatttaaaaaggttaatagtttggtggggagaggaggtgtaaggttggtttttgttttttgggttttgattgaaagggaataggggatatatttggggatagttttttttttggaggaagaagggtttagggtgttggtgtggagtttgtatagatggggataatgagttggagggtgttgggtaggagttggttagtaataggttgatgagggaggttttgttggttgggtttggtttttaagtgagtattttgagttgtggggatttagggggttttagagattttagagttgagatttgggattatagaggggtgggttgtgtttagggtaatatagtggatggggtagatgttgtgaaatttgtttttttgttttttttttttttgttatagaattggatttttttagtttatggttgttaaattttttagatgtttttgggttttatgggtgttttatattggtttttttgtaggatagtagattttgggggttggttttgatggtatttattatggggtattttatgtaagtatagtgtttttatgtttagttttttagtttgtggagtaggtttgtgtttggttagttttattttgtggttagaggagggagatagtggttttggagataggagttggtttggggttgtttttttagtttttgtttttttagtttatttttttgttttgtgggtgttggttattttttttttgttagttttatttttagttttttttgtttgagttgtgatttgttagtagggggtagtggaggttttgaaagtttttggagaggattttgaagtagtttttataaatttgtttttggaaagttttttttgttatatttttagtggtttttttttttttaatattttttttggggttgttatgtagtggggggtggaggaatttattaggttgtggatagagtagagttatgttgatataaattttggttgaatttatatgttttttatagttagtggttgattattggaattagggaagtgattttatagtaagggtttgtagagtagttattatgtatttttgattttggtttttggatttagttttggaaaagaagttagattttagttatttggagttgtttagggaagattttagtttggtgttggttgatagtttattggaattttttatttgtttggttaggtgatgttaaggggtagaggttagaagtgttaagaagtaggttgagggtggtggtttatgtatgtaattttaatattttgggaggttaaggtgggtgaattttttaaggttaggagtttaagattaggttggttaatatggtgaaattttatttttattgaaaatataaaaattagttaggtatggtggtgtatgtttgtaattttagttattttggaggttgaggtaggagaattttttgaatttgggaggtagaggttgtagtgagttgagattgtgttattgtattttagtttgggtaatagagtaatattttgtattaaaaaaaaaaaaaagaagaagaataagaagtgttaagaagtatttgtttttttgattgaaaagtaatttttgttgggtgtggtggtttatgtttgtaattttagttttgggaggttgtggtgggagagttgtttgaggttaggtgtttgagattagtttgggtaatagaggtgttaggggtagtggtgtttgtttgtagttttagttttttaggaggtttaggtaggaggattgtttgagttaggagtttgaggttgtagtgagttatgattatattattgtattttagtttttgggtgataggatgagattttgttttaaaaaataaaatataaataaaaaattaatgtttattttttgtgattttaaaaattatatttatttgtgataaaataattaaattagaaaatgtaaaggaaatgattaataataattgtgttttttagataaatattgttaatatgtttatgtttttttttagtttttttttatatagatatttaatatttattaatttgttttgaattaaagatggttttttttgttttgtatgagaattattttagttaggtatggtggtttatgtttataattttagaaagttgaggtaggtagattgtttgagtttatgagtttgagattagtttgggtaatatggtgaaattttatttttataaaaaaatataaaaattagtttggtgtggtggtatatgtttgtgtttttagttttttaggaggttgaggtaggagaatagtttgagtttgggaggtagaggttgtagtgagttaagattgtgttattgtattttagtttaggtaatgggagtgaaatgttgttttaaaaaaaaaaaaaaaaaaaaaaaagttgttatgttgttattttttttagggatttttattttttttattttttgtttaagatttgttttgtaaaaggatgaggttaaatagttatgggagggtggtattggatgtttaaaaaaatgttttgtggttggtgggatttagaaataggttggggaggttttagtagagggtggattttagttgggggtggggggtagtaggggggttttttatatgttttttttgtgtgttttatggggttgtttgtgaggttgtgtgaattagagtttggttgggaagttatatgttatttggattttgattttttttggtagtatgattttagttaatatgtttaattatgtttttttttgtaaaatgggttaatagaaatgtttatttgagatatgatgagaaataaaggtgtttatagagtaaagtgtttagaatggttttggtatgataggagtttatatgttagtgttgttgttggtattgttattattatggtggtattggttgttttgttttttttttgtttttgttattttttttttttagtaggtttttatttatttgtttatttatttatggttgaggttttgtttgtgttaggtttggtgttgagaatgggggtagagagatgggggttgtgttttgttttttgatttaagggttttttttgtaatgtgaagtttttggagattggatttttaggttgttttattagtttttttttaggttagtttaatttttttgtgtttgttttttgagttgttagaggaagagagtgggaggaaggatggagtggggtttttgtggggattgagtggggggtgtgtgaggttttggaaatggtgtttgtggtatttatgtagtattagtttttgttgtagttgttgtttggagaatatttttggattttaggatattgatgatagaaggtggaatgttttttttggaagttattaagaggggattattgtggtggttgagtagagttgttgatttgtgagttgtggtttgattatagttattgtttttatgagtgaggttttttgtggttttttttttaggaatttttggttttttggtaggggatagtttagggttgggggtgggtagtggtgtttgtaggtttttttggagttagagaattttttgttgttgtggtggggttgtttttttttgtttttttttttttgttgtgtttttagttgttttgataggatgtttttggtttgagagatagaaattttaattttgaatggttttagtttttaagagaatttggagtttttttgtgtaaaatgagatgttttgagtattgaggatgttgtgggggattttttattttattatttttagttgtggtgttttttttggttataggatgttgtagttatgttgtagggaaggagagtttttttttttgtgagtttagggagtttttttatgtagtttttttattggttattgtttgagatttgatttggtggtttttgttttaaggagtagaaagggggtttgttaggttagggtggggttgggtgtgaggattttttttggttaatagggtttgtttaggtgtttgttttgttggggtagtagggaagggatttatatgtggtattgggatatggagaggtttttgtgtttgtgatggttaaaagggatggtgttttagttatgtttttatttattttgaggtttagtatggttatgttggaaatagtagtattgttttttttattgttttggtttgtttttaataggttagaggggtggggttggagtgggtgtttgatttgtggttggatttagttgtttgtggataggttgtgagtgaatttgtagaggaagggagatgggaatgttgggatttttttttgtattttttgaatttttgttttttgtgagttagatggggagtgtatttttgttttttttttttgggtattttttgtgttttttgttttaggtatttgatgttgtttgtttattttttttttttgttttttttgttggttttttttatatggttttaattaggattttttgtttgttggtggatgggtagagaggggagtttgttgtggggttttttttgattgggggattttttagtatagagttttttggtttttgtagggatgttgtgtgtgtttgtgtgagtttggtgtgttagaagtgttaagttgtagttgttttgtgtgttttttatattttttattttttaaaggttttgggtttggtgtttgtgggttggggatttgtgttggggtttttaggaggtttttggtgggagaggtagggtttttttttttttaatttgggtaattttgttttggtttgttgtttgtggaaagtgttttaggatatggtggtaggattggttggggttttggttttaggtttagttttagtttttgttagatttattttttttgtgtttttgtttattttgtttatttgtagggtttgtaggagtattttgagagttggtagggtggtttgtttggtgtttgtatagggtttgttggtgggtggttgaggttgtggtgaggtttttatggtttttttgttttgtatattttttttttgttgtgttgttttgttagtatatgagtttgtattgtttttgagtttgtagtttgttttttttattaggtggttaagtagggtggtagttagggtggtagagttttattggtttgtaggggattttttgtgggttgtaggtagttttttgtggttgaaggtgttttggtaggatttgtattatgatttttgttaaagtttatgtttaaggtatttgtgggtatttttgttttagatgtgagggttggtatttttttttgtatgtgaagtaaaggtttgtttgaaggagtgtgtggaagtttgggtgtgatgaaggtaaggattggtggtttattttttttgtatttggattttgggtggtaggtttggggtttttagtttttaatttaggagggtagttagttgttggaattaagagtgaattttagttgttgttgttatagttggagggaagaggggaaaggaggtgttgtaggggagtagagattttattttttttttgttgatattaggttgttggtgttggatggggttttggtaattgtggtaggagtggtgatgtttgatgatggtaataagggttttttgaggattttgagttgttttaagggttttttatttggagtaagtattttttttaatttttttaataatattgtgaaattgattttgttgttatttttattttattgatgaggaatttatagtttagagatgttaagtaatttgtttaagtttttttttgagtatggtagagggagggtttgaatgtggaaagtttggttttagtgtttttatttttaattattgttatttatttttttggttagttttttgattgtaaaatttgaggtttagaggagtgtagtgatttggttagttttgtatggtaggttagtggtagagttgagtagtgttttttatgttttgattttgtggttttttgaggtggtttatttttaaatatgttttttatggtggttttgttttttttttttttttgaatttgttagtttgtgtttaggtagggggagaagtagagtaattatgttgggtgggttgttgtgttttagtgttgtttgttttatatttgattggtagtagagtggtttttttttggtgtggtttggaggtgttagtggttatttattagtatagtttagttttatatatgttatttttaaaggatgttgatatagaatgaagtagttaggggaggtggatgttttggtatgagggtggtgtttttggtaatttgtagtgttgttgtttgtggttgtttttggttggtattttatttttttttggttgttttgtagttatttgagggaggttagtatgttgtttttattttaggatagtgtgaatgtagtagtgtaagtttgttagtgttgtattgtgggatttggaggtttttgtttttgagttttgtttttgtgtaatttttaaagtatggattttttaggggtttttatttttttatttggaaaaattttatattgtttagggtttgaggtagggttagagtatggagatgttgttggaggattaagggagaattgagtgtgtgtttttttggttttagttttgtgtgtgtgtttatgtatgggtattttgttatttatattggtttttatggttgggtgggagttgagttgagtttggtggttgtttttttattttgtgggtttggttggggagtgtgaggatgtttgttggaagttaatgtgtatgaaagagttaatggtggattttatttttttagttttttttttagtttttttagggaaagggtaggaatagagaggttttatttttagaggaaggggtgggtggggatatagtgttgtttggtatagttttttttgagttattttgtatgttttattttattgatttttgtagtttagttgtttagagtggatttagaaggtggagagagggtttttaataagtagaggatggagtgaatgtgagatttattattgggatttggtaaagtaaagagttttattttttttttgtagatgggatgggggtggggttggagttagtggggtgggggtatttagtaagagtttttttttatttttttattttttttgttatgggtttttttttttatgtagatttttagtttggaatgattagtgtttagttttttttgttttttttttgttttgttggagggagtgatttggtttttggttttggttatttatattttttgttttgttgtattagttttgtggtaggggttgtggtggaggtgggtaaaagttgtttttgggtagttagtttttattttgggagtgattgaaagtttttgggggtttttgtagggtgagttgtttattttggttttggtaaggatatttaggagagggttagggtgtttgtatttggggtatagtataaagaatagttgtaagtgttttttaggtaggagggtgttgaagtattgggaagttgggatttagaagtattgtttggggtggtgagtggaagatgtaggatatagatttatgtgattgtgtagattatttggttttatttttttggtttatagtggaggaaattagaggttgagagaggtgaagtgagttttttggggttatatagtttagttaggtttagggtgttgattttttgttttgtttttttgtgtttatttggttggtattagtatttttgttttgatatttttgtgtggtagttgttgtgattttgtgatttttttttattttattttagtggggttttgtgagggaaagaagaatgttttatgtagaagtggttggaaagtaagaagtttggagagaagtgaggtttttgtggtttggtttgagtttaggatttatggtttggtttttagggatggagtattgattttttttttttatatttttattttatgtttttaggagttttttatggggaagttggaatggatttgggtttagagattgtaaatttattttgttggatgtgtggttgtttttatgtaattaatttttttatggagaagttaggggatggtttttagtatttttgggggttttttagtgaggtgggaggattttgagaggttaggaggttgtttaagattttttgttttttagggattaggtgagggtttgttgattgttttgattttttgatgtttttggtggggagattttagaggggtttgttgttattattgttagtggttttggtttgtttagttatttttttggggtggttaaattttatgttgtaaaagtttaagtgaattttagtagtggtttgggagaattatttgttatgagttaaggatggagtttttggggaggattttttgttgttttttaattttttttgggtatatttttttgtagttttattttttgtaagaaagttaggtgttttttgaagtttttttttggttttaggttagaggtgatagtgggggttttttgtttgtgttggtgattgtggttggttgttggtgtttggttttgttttgtattgtgtatttattgaaggtggtattatttgggtttttttggtggttatgtatgggtgagtagtttatgatatatttgtttttagtattgtgtgggttggggtttttagaggggttgagggtttggatggttttgtaggggggtgtttttggttttgtgattgaaaggagttgaaggtttggagaagttgttgggttgaggttagtttttatagatttggtgaggagggaatagatgtttatggagttgttttaggtattgtatatattgttttattttgtgttgatagttaagaggttggttttttgttgatttttattttatagataatgtgtttttttagttttttagtggtggagttaggatttgaatttatgtaggtagttttttgggtttgtagttttattttttatttttttttaggatttatgttttggggttggtaggataatgatttttagagttgagtatattttaatttttagtatttgggattatgttaggtgatatggtagggttagttaaggttattaattagttggttttaaaatagggagatgattttggatgatttatatgggtttgttgttattataagagtttttaaaagtgtaatagattatttgaggggtgtagtgggagaggtttggaaggaggaaggaggttataagttaagaaatgtaggtgaatagaaaatgtaggaaaatgtagttttttttgtagttttgggagggtgtgtagttttgtggatattttttttgtagtttagtgaggtggagtgtgggattaatttgtgttgtttgatattataagtgtgtggttatttgttatagtagtgatgggaattgaatgttattaggtagtagtgtttttattttggaagaattaggataaatttttttgtggattttaagttttgggagattttgggtttttttggattgttttagttttgtaattataggaaaggttttttatgtttgtttgggagaagaaaattttgtagtaaatttatttttttttttgataaatgaaggtgagggtgtgggttggatatatgttttttttttgtggattttttttgttttaatatttagaattttgtagttgaaggagattttggggggttgtttgtttgatttgtaagtgaagaaatggaggtttagggaagttaagtgattggtttagggttatgtagagttatgttggaatattaagttagatagtttagtttttgttttaaagtgtttttttttttggttggggaggagggttggagggagtggattttgagtaatagtagtattggtaggggttggaagagtagttattgtatttaggtgttggagtttttggttattttttgtaggaattaggtgatttattatggtataggtttttttttgtttatttgtagttttgggggttttagggattagaggatattttggtttgagggttggggtttgagagaagagatggaagtatttttagtttggtttgtttttgtggtgttttgtaggtatatttggtagtttaggggttttagagaatttggttggtgggtgtttttattttgttgtagttgtattttgtggttagtagtttgtaggatttgggttgttgtttgtggttttgaaatagttattttttgagttgagtggggattaggtgagtagatttttatattttaattgttgtgatttttttgttttggaggttggtgggtagtttggttggtgttttatggtattttatgattggttttgttattaggtttgtgagttgtttttttttttttgggtattttgaatggtttttttgagagttttgttttgggtttttgtttttgtaggtttttgttgtttggggtgttttttttttttggaagttgggtttttttggggatttattaagaagggttttgttgagtgttgttaaattgttttatttggtttttatttgttttatttattattttattttaatttttatgttttttttttggttttaagatttgagtaggtagggtttgtgaggtattttaggttttttgatgttgttagtatttaggggattgttagtatatatgtagggagggaaggaatgaaggaagagatgatttggggagttttttagtttttatttgtaattggtatattgtgataaaatatttatggtattttattttttttatatattttttttttaaatttatttttatttgagatggagttttgttttgttatttaggttggagtgtagtagtataattttggtttattgtaatttttattttttgggtttaagtgagttttttgttttagttttttaagtagttgggattataggtgtttattattatgtttggtgaatttttgtatttttagtagagatggggttttattaagttggttaggttggttttgaatttttgattttaggtgatttgtttgtttttgttttttaaagtgttgggattataggtgtgagttattgtatttggtttttgtatatttataaaagagaatttgtttagaaaattttttagatgtatttttagggttttaaggtatagatatatgaagtttgttagtgagtagttgttgtttattttttttttttttttaatttagagtggtttgtgttttaagtggatagttgtttttttttttttggttttttgttgtttatgtttttatagaagtagggagaagaggtaggaaggtgatgtgtgattatttgttgggtgtttgtatagtgttgtttgtataggtgttattttttttatttgttattttttttgttgagtttttttttttttttgtagatgagagagtattgttttttagaggttaagaaatgggtttagagttatttagttgattagtgtgtagttagatttgaattatattttgttgatttttatgtttgtaggtttggtttgatgagatggatagttgggtggtggagattttgagattttggatggtttttaaatagggtttgtagtttttggatagggagagtttggtataaagggtttgtggagtgagttgggggagaaggtggtttagggtttttgtttttgaataaatagatggaggggttattttagtgtttttttagtttttggtgtgttgggtttttggttttgggaggagagaatggagttggtttttattttgggttgggttggtttgggtttaatttagataagttttttagtttgttatgagtgatatttttgtttgttttggtgtttttgttaaaaatatgaagggttttagaatttttattttggtttgttttttttttagatttggagtgggtttggggttgataatagttttatgttagatagtttgagtagttattagtgttattaggtttgatattgtggtttttgttttggagggaaaaataaggttttttttgggggattttttgttagtttgtgaaaataggtttggagttagttagtgtttttatgtttagatattttgtgtggtttttaaagtgtttttatgttgttagtttatatgattttttttaaaattttataagggagggtaggaagtttgagtaatagtttgttaagtatttatatagtaggtggttttattgttttttatttatagataagtaaattgagttttagggtggttattgtttgttttttaagttatttagttatttagttatggaagaggttatgattttttatattttagtgaagttgaagatttttttttttgtttttaaaaatgtttattttttagggtagtgaatatttggtgtttttgtttagtgtaagaggtgaatgtttgttatttttgtttttttttttttattagatttgattttttttttgtgatgggaatattttgtaggtagtttgttttgtttttatagattttgagaaatggggtttaaattgttggttgtgggtgggataggtgatattgtagtgaagaggtggagtatttttgtagtggggaagaaatatattttttttatttttttaggtttagtgtttgggggtttgtgaattaaatttatttaagataaattaatgagagaaaagatagatttaattatatatgtatgggattttattgaaaaatgtgatttaaaagagtaggtagaaggtggggtttgtgattggtttgaaggtagtgagttattttagttgattgtttatagttagttatagattagattttttgttttattgttttttttttttttatttgttttgttttttttgagttagagttttgtattgttgtttgggttggagtgtaatggtatgattttggtttattttaatttttgttttttgggtttaagtgatttttttgttttagttttttgagtagttaggattataggtatttattattatgtttggttaattttttgtatttttagtagagatagggttttattatgttggttaggttggttttaaatttttgattttgtgatttgtttattttggttttttaaagtggtgggattataggtatgagttattgtatttagttaattagttttaaaaaaaaaaaaaaaaaaaaaagaatttagggtttgtatattattttaataggaaaaaaggaaggggtgaaagtatatattatgggttgggtgtgatggtttatgtttgtaattttggtattttgggaggttgaggtaggtggattatttgaggttgggaatttaagattagtttggttaatatggtgaaattttgtttttattaaaaatataaaaattagttgggtatggtggtgtatatttgtaattttagttatttgggaagttgaggtaggagaattgtttgaatttatgaggtggaggttgtagtgagttgagattatattattgtattttagtttgggtaatagagtgagattgtgttttaaaaaaataaataaaaaaaaaaaagtatatattatggtaaaataaatgagtttttggaaagataaataggtttttaggagttgagatgggagatgtgaagttttgtgataatgtttttttaggtgtggtgtggaaattatttatattttttagggaagagttagttgtttttagggagtagatttgggtttgtatattattttaataggggaaatggaaggggtaaaagtatatattatgggttgggtgtaatgtgtttagtgtaggaggtagatgtggtttatggttgttgttgaaattagtgtagggtttgattgttttgtattgagtgttgaggattttggttttgtattagttatgagtttgtagttttgggatatatttgatgttggtttaaggggaaatgaggttggaggggtagggtggttggattggatgtgggtttggggttattgttgatttataaagtggttattatatgggaataatagagttggttatagattataattagtaatattatttaaaagtaaggttatatttttaataataagttatattttaagttattattaatttataaaatatattgttggtataatgatagttttttaagaaggatataaaaaggtatgttgggttgggtgtagtgatttatgtttataattttagtattttgagaggttgaggttggtggattattttaagttaggagtttgagattagtttggttaatatggtgaaattttgtttttgttaaaaatataaaaaaaaattagtttggtgtggtggtgtatgtttgtaattttagttatgggggaggttgtggtagaagaattatttaaaatttgggaggtggaggttgtagtgagttgagattgtgttattatattttagtttgggtaatagagttagattttgttttaaaaaaaaagaaaaaaaagaaaaaaagtaaaaaggtatgttgaaggtatttgtttgtggaaagttgtaatttgatgggaggtagggtgagtattttttagaaaggtggaaatgggtttttttgttatagagatttataaatatagattgaggtttgtagtttaggagatttaaaagaggtaaaggtgaataagagttaaggtttttaagttagggtttgattttgggggtgggggttatatatgatggaggatgttaggagggttttttggaggtggtgatatttattaggggggattttaggtggggtttgtgagatagtaggatttggttgaagagtgtaggttttttagataggagtgggaatttaggtttgaaaatgagttggttagattgtaggggtttttgaatgtaagggaagaattttaattttaatagaggagtttgggaagttgtttgggaaaaggagtgataaagtgggaggggttttttagtagagttttgtatgggtaggagggagtgagatgggaggtgggtgttggtaagggatgattttagtggtttaggggagtagttatagggtggaaattaattttgtggggtttgggtaggaagggattgatttgagatattgggaagaaatagttagtaggattttggtgagagggttgggggttggggaggggggtgtggagagtgggagtttgagtttttgaaaatagatagtgttttaagggggagatttgaggtaagatgtggagaggtagttgagttgggaagttggaatggaggtgtggttattttaggagattaagttagggggtgaggggatttttgggagttatttagattttagtattagggaatatggaggggagaaggaggggagaagaattagttggtgtgtgttaggtattgtttttgaggttagatggggtggggttggatattggttatgaggatttttttaagagttgggttaatagtgagatgggtggatattagatggtttgggttaagaagtaagtgggtggtgggaagttagaagttgtggtgtagatttattttgagaggttgggttgtttagatagggagaaagtttatagtttgaggaggtagataggttaaaggaagagggtttgtttgtttttgagattggggtattttgaatgtttttttaggttaagtgagaagaaattagaagaggaatatgttatttaaatgtgttgaaatagtttagtagttgtgttgttttatagaaaatgtgtagaggtttttttgttttattatgtttgtttggggatggtttttatttgggttatttagggtttttttagtttgttaatttaagggtggtaggagttgtgggtgtttttagtttttttttaaggttggtttgtgggtagaaatgtgggttgttttggggtgttatagttataaatgtatattagtttttagaattatatttttgttttttagtttttttttttgtatttttatgtagaagtgtggttgttagtttataaaggatagggagggatattgtttttggtatttgatgggaagtatttgttgtattttattggggtgttgtttaggatggattggaaaagagttggtaggaaggttgagttttgtgtttataatttggtttggtggtggttgaggagtttggtaggagtagagtgtaggatttgggaattgggggttggtgtatgtgtgtatgtatgtgtgtgtgtgtgtgtgtgtgtgttgggtgggtagggaggaagttgtgaaattatatttttttttttttgttgttgtgttgttgtgtgttttagtagtatgtgggtgttattatattttttagtaggtgttaatttttaagattgttttgggttttttttttagttggttgagttggaggtgggagttttaattgttttttgtggtttttagagtgggattttgttgtgggataggttggttaatggtgtttttttttttgtgatttttttgttgggtgggttatgaggaaggattgtgggtgttgtttatagataggtggatatgtggtaaggatattttgggattttttttttgatgttttttgaagggggtatttttttagttttgagatgagtttttgtggatgtgggaagtttattattttaagagtagtagttttggaaaatttaatatagaattttgagtaggggtgggaaggggttttgttttgtttattggttgtttggtagagttttgtataaggaagtgtttgtgttgttgtgggtggaggaatggattgagggttatatttgttttttgttgttgttgtaattgtttattataaatttagtggtttaaagtaatagaggtttttttttttatagtgttaagggttagaagttgattagttttattggattaaagttaaggtgttggtagaatttatttttgttttttttagttttgggtgggaggttttgttggagttttttggtttgtggttgtatttttttagtttttgtttttatttttttatagttttttttttttttgtagttagatttttttttgttttttttttttttttttttgagatggagttatttaggttggagtgtagtggtataattttggtttattgtagtttttgttttttgggtttaagtgatttttttgttttagttttttgagtagttgggattataggtatgtgttattatatttggttaatttttgtatttttagtagagatagggttttgttatgttggttaggttggttttgaatttttgattttaggtgatttgtttgttttagttttttaaagtgttgggattgtagttatgagttattatatttggtttgttttttttttaaaggatgtttgtgatttggggtttatttgggtaatttttttattttaatatttttagttatatttatagagtttttgttgttatatgaggtaatatagtttgggaagggagagttatttagtttattttaggggtttgtggtgtattttagggtttttttgattttaagatataaagtaagaaaataaattggtttaaggggaaaaaaggatatgttgaattttgttgttttaaatgtatatttttttattgtgttaaaatgtatagaatataaaatttgttattagtaatattgagtatatttatagtgttgtgtaattattagtattgtttagtgttagaatttttttattattttaaagggaaattttgtatttatgaaggatttattttttatttgttttttttagtttttggtagttattagaatgttttttgtttttataaatttatttttaataagtgtaattttgtgtgattttaaaataaataaatatgagtatgatgagttgtttattggaaggatatttatgtggggaggttggtgtgtggagtgtgtaggtttttggatgggtaggagttgaaggggtgtggatgtgttgtttttttttttttttgttttttttttggggttattgtttgagtatttttttttgtaaatggttttaaataatgttttagtttttatgtttgtattgttttttagttttaggattttttattaaaaaatattttaagttttagatttatttttgggaaaattttaatggttttatttttttttttgagttagttagattttatggtttgtggtgggttgtttttgagttttgagtatttgtgagttagggaagtaggataggtatatttagggaaggggaagagttgttgttagttatagtaattgatatttttggaattgtttaagagatatttagtgtgtgtttaaaatatttatttttttttttgtttgttttttgagatgaagttttgttttgttgtttaggttggagtgtagtggtgtgattttagtttattgtaattttttttttttgggtttaagtgatttttttgttttaattttttgagtggttgggattataggtatatattattatgtttggtgaatttttgtatttttagtagtgattgggttttattatgttggttaggttggttttgaatttttgattttaggtaatgtgtttgttttggttttttaaagtgttgggatgataggtgtgagttaatatatttggttatatttattttttaggagaagttttgtattttttgaaagtgaaatgtttttaggtgggtgatattgatggtgggatttgtggttttattagtgttttatgagagatgttgttgtgtgttttattaagttgtattttattgttttttaaatgtggtttgtagatatggtgttgagaatgatttgggaggtttaaattataatatggtttaaattaatagttttttgatgatttggtattattttaggattaaattgagattatttgaggatgggtgtggtggtttatgtgtgtaattttagtattttaggaggttgaggtgggtggattaattgaggtttgtagtttgagattagtttggttaatatggtgaaattttatttttattaaaaatataaaaagtagttgttggatatggtggtgtatgtttgtagttttagttatttgggaggttgaggtgggagaattgtttgaatttaggagatggaggttgtagtgagttaagattatgttattgtgttttagtttgggtgatagagtaagattttgttttttggtaattaaaaaaaaaaaaaaaaattgagattttttgagttgtattgtttagtatgatagttattggttgtatggggttatttgaatatttgaaatgtggtgattttaagtggagaggtgttgtgtgtgtgaagtgtattttgggttttagagttttagtaagggggaaagaaaagaatattaaatatttgttatttttatattgattatatgttgaattgataatattttgggttttgttaagtgaatgatattaaaattaatattatttgtttttatattttttaatgattttttttttttttttttttttttttttttttaaatatggggttttatattgttgtttaggttggagtgtagtggtatgattttggtttattgtaatttttgttttttaggtttgagtgatttttttgttttagttttttaagtagttgggattataggtggttgttattatgtttggttaatttttgtatttttagtagagatagggttttgttatgttggttaggttggttttgaatttttgattttaggtgatttgtttattttagttttttaaagtgttggtatgataggtgtgagttattgtgtttggtttgtttttatattttttattgtaggtgttggaaaatgtaaggttgtgtttgtggtttatgtgttgtttttgttggagggttggattgagggttagttgagaaggttttggggttgttttatttgaatgttgagtgtgtgttgagtggtagagaattttgagaagtgttgaaggatagaggttttgtgtgggggatgtagttttaggttggagatgttttttttgtgttttggagatttttatttggtgatagtaagaggaattattgtaagaggggtggttattttagtaaagtatttaggatgttggttttttagtttaggaatttagaggtagaggaggggaggaggttgggtttggaggagagtagggttttgggttttgggaaaagtttggggggttagaaagttgggggatagattgaggttagaggtaaagagaagaaggtttggagaggagggttaaggaagaagggttttgtttatggggagggagaggtttatggggtaggggtgtggtgggagttgtatttttgaggttttttgttgattttgatatttggttagaaaggagttttttttggtattttttgttagtggtttttggagttgttttttaggggttagtgatgagggtgttttgggttgggttgtagatagtggaaaagataggttttttttatttttagtgttggggaaattagttttttggaggaagggggagttgtattttttgagtggttgtattttttggtttagatgtgtgtgttttgttgtaattttggtgattggtgttggtggtgtttattttatggatggggaaggttaaattttatagatattgagtgataggtttagggttttggattttagtgtttgatttagaatttaggtttttgatttgttattagttttttttttatttagatgggaatagggattttgggtatgtagtttttttttagatatttttttggttttggtttggtgtttggagattagtagtagtagttttttatggttgtttattgtgagggtggggagggttgtgggattaggaggttttagggggaaagttggttatgaggagtgggaagtgatgggttagatgttagtgattgttggttggggagttgttggatgtggttggtttgtttggttagtgtggtgggtgttttggggttttagttatttttagttatgtgtgggggtgtgggatgggaaaggtaagagtgtgtggagtttagttagtatttaatatgaggttttgtgggggttgtttgagggtgtagtttttagaatttagtttttggtttttagaaggtgttattaaaggtttttttttatttgagtgaattttttttagtttttagtaagtttttggaatgagtttatttttaggtgtttttttttagtgtgggagtggttatgtttttgttgggagtgatttatttgggtttagaggttgtggtattgagatgggtttggtagattttagtgtttaggtttagtttttatagtgttagtttttttttttggggatttttttgtttgtgtttttttgggttttagtatattttaggtttgtagggagggggagaggaagagattgatttattggttaggttttttaggggttggagaggttggagaggtaggagttggattagatttgaatttagaggtttttggaggaagagtttagggtgagttgtgtttttattttttgtttttttttttttgtttttttttttttttatggttttagttagtaagtatttggggtagaggggataaatttaggtggttgtgttttagttttggttgtaggtttgaatggttttttggggtggttggttatgttttttgagagtttagttgtggtgatgtttgagtaggtaggtgggggagtatttaggaagtaggggtgttaggtagagtataaggagagagggtgtttaggttagttttaggatttggttgagaggagggggttttttatgggtattgtttttggtaagtatagggataagggtaaggatggtatggttagaggtttttgggagttttttttttttttttttttttagtagtttttttttattttttttagggattttgttatttttttttagtgtgtggtagttttttggtgttttttttgtgtttttaggttgtttttgtgttgggtttgttgttgggtgtttttatttttgtttgttttttttttttgttttttttgttttgtttttttggagtaattttttattgagtttttttttttaggtagttgaggtttttttttatttttgttttgtgttttgggaggttttttgttttgtgattataaagtttttttgattttttgtttggttttgagttatgtgatttggtgggtgggttgtggtttttggtgtgtttagtgtagtttgatgttttgttgttggggtgagttttgtttttttgttttttttagttttgtattattggtttgggggtttttaggtggtgtggttgtgaggtggattttgatggttatggtggtggtgttgggagttatgttgtttttgggttttggtttgaggttggtaggattgagtggggtttttaggagaggggtggtggggagtttgatttttatgtggggattagatttttggttttaaaatagaagaatagggttttgtgtggttatagttatttttttgtaaatatttggttaattaagttgagtggttaagtttttttgttgtttggagttttttggaatatgttttttttttgtaaggggtttttttggtttttaggagggttaggaagaaatttgaattggttattgttttttttaaaattattttgtttaagttattatttttttgggtttttgaagattggttggttggaggttggagatagttttaatgtttgaaatgttgtaattgaagttttttgtggtgttggtattgggatttagggagttgttgttatagtgtagttttggatttttggatgtgttggatatgtgtagggtgtttttgggaggagtggggagggagggtgttgttggtggggttggtttgtgtgtgttttgtttttttataatggtatgttgtgtgttggttatgtagaggtatgttagtgagtaggggttgagggatttttttaatggatttgtttttagagggtttttttatgttgggagaattttagagattaaattatgtagttaatggggtggtttttggttttaaagtagggaggggtgaggagttttgtaggtaatgttatttgtttttgaaatgttgttttagtgattttggggattgatttagtttttagtttgttgtattttatttttggtttttttttttttgtttttttatgtgaaatttgttgtgttttggttagaggtttggggaatagttttttgtttatttaagataagtttgtaattttttttttggagaaaaatatgttatttggaagtaggttgagtagtggttttttggtaggtttgtttggggttgtggagatagtatttgttggattaggatggagttggaatttggtttggattttatatgagaaaatttgttggaagaggaggaagtagaaaaaggttttattttttaataatgttgtgggttttttttttttatttattgttattttgttttgaaatttaatggggttatgtgtgtttttatgaatgttattttttttggttaatttttttggtagttttaggagtttttttttaggaaaaggaagaaggtgtttgtttagtatttagtatatgagtttttgttggaaaggtgggatttttgtttttttttgggttttttttaggttgagatgtggttaaggaaggtttgtggtgtggtttgttttttttaatgtttgtttttggagatttgagttgttgttgatttttagtttgttttttttgttttttggttatttttgtgttggggtggttgagatattattgtattggttattttgtgtttttattagtttttgtttttgtaggttgttattgtgatggtgatggggttaatttagttgtggtggggaggatttattgtgtgtgtttggggggtggtgtggggtattttgggatgagaagatgtgatttttgttttgagagttttgttttaatggaaggtgggggtatagttgtaggtagaagttattaagtattgtggttagattagtattttatgttaaaaatggttttgttggttgggtgtagtggtttatgtttgtaattttaatattttaggaggttaaggtaggtagattatttgaggttaagagtttgagattagtttggttaatatggtgaaattttgtttttattaaaaatattggttaatttgggtatggtggtgtgtgtttgtaatggtagttatttgggaggttgagataggagaattatttgaatttgggaggtggaggttgtagtgagttgagattgtgttattgtattttagtttgggtaataagagtgaaattttgttttaaaaaaaaaaaaaaaaagttttatttgggtttgggatttgttttttgaatattgggtttattgtgttttataaggatttttattttggaagttttagatttatttgggtaattagagtttttgggttgattattttttagttttggttagttttttgggttattgtatttttttaattttttgttgtgttatggttggtttaagttgtttttattagataatgtgaggtatttttataggaggggataattttgtttttaggagttttttttttttgtttttaggtttggtgtagtgtgtggtttttttgttggtgttaaaggttttaaggtttttttaagaagtttgttattattattagtagtttttgttatttggtttttttgtatatgtaagttttttttatatattttggatgtttagggtttttgttttttttttttggttgggagtgtgggaagagggttttattttaatgtttgagagtagggttaatggttagggtaagttgtgggggtttttttttgttggtttttttttgtagtttttattttaatatagagtattgatattatttgggttttgggaagatttggaggttgattattttggaggtttttagtgttttatagttattttttggggaagaggttttttgagggatttgtggtttttggttgggattttagttttagagttttgttttttggtgttgagttttgatttgtttattgagtgttagtttggtttttggataggtagggatttgtttttggagtttagtagagttttgggaagtttttttaggagggtttttgagggtggtggttatgtttagtttgttgtatgtgtgagtttgtttgatgaggaattggttgggaaggtgtgggtttaattataggtttatgagggttttttttgtttttatttaggaagtagtggagattttggtatatttagtatttgggtttgtgtttgtttagttgttggtggaattatgggagttttgttttggggtttgtagagtagtagtgggaattttttttattttagttttttttagagttggttgtttaaatttgttgttgtttagtttttttttttttttttttattaattttgggaattgtatattgtttattttattgggttttggagtgggtgtaggaagagagagtttaatatttagaggtttgggttttttgtaggtgtttgagttgttgtggtttgagttgggttttttgttggaattattatagtagatttaatgatttgtttgtaggagttgttttattttagttgattttggggttgtgggaaggggttgggttttggttttgttgggggtggggggttagtgtaaagggtttgaaaagtggtagaggtgatggtttatttgttttttttttggttggttggtttaaatgtgattggttttttttttttttttttttttttttttttttttttataaataatattaaatgtgatttgttaatgtatttatttgggtttagtagttggattatgggtagaagtattttagatttgttattttttttaagttaagggtggggaatattttttgtgagattttggtttttgagtgtttaagattgtttttggaattttaattttgggttggttttaggggattgatgttgatggagttgttgatattgatttttggtttttgtatggtttttaggaagggggttttttgttttttgttttgttgagtttggttggtagtattttttttttaggtttgtgtttttggtagggtttgttgtttttgttttgttttgtgggtgttaggttttaagtattaggtgatttggttattgaatggttattgaatagttatttttgttggtgtttttagtggaatgtgtatggatgtttttttttttttagatttttgttttttattttttagtttttgttttaggggttattataggattaggaggtatgtagatgtgggtggtatatttattgggtagatttagttttgaatttgtatgttttttttaagggggtttttagtgggtggggttgatggtgttgtttttttttttgttattagaatggatatgaggattgtgttttgttgatttatgttttgagtttttagatgttataggtgtttgtttaatgagtgtttgaatgaatggttagtattgtgtgattgtagatttttaatttttatttaaatagtttgtggtttttgtgaggttattttgagatagttttataagaatttttattttttttgtatgttttgtataaggtttttttggggggttttttagaaaaagggttaaagagtagtatttttttggggatttgaatatgattttttttggggtaggggattgttttggaagatttttggtattgttttttatgtgttatgtgattaggagggttttggggtaggatggtgttttttgtgttttgtgtgttggggttggaggaaatattgtttgtggttggtgttatttgttagttttgaagattaatgatgggttggatagtggttttattgagtgggagggagaattgttgttgtttgtagttggggggttgggtgggtgggagttgaggttagggagaatagtgtagatttggtatggagaggtttggaggaggagtagggggttttagttatttagggtgtagggatgttatatgaggagtaggtgtggtgtgtgtttttttgtgggttttttattttttggttttgttatttgtattaggttttgtggtgagagggtatagagtggaggaaggtgttgtggttagggtaggttatatgttgtgttaatggattgttgttatttgttgtttttgtggttttgttgttaggattttttagtattaggtttttattattaggtatgggttttataggtattattggttttttgaagttagggatagattttatagataatattgagtttttgtagttagggatgggtttttatggttagtattagattttagggattagtattgggtatttatagttagggataggtttttatggttagtattaggttttagggattagtattgggtatttatagttagggatgggtttttatggttagtattagattttagggattagtattgggtatttatagttagggatgggtttttatggttagtattaggttttagggattagtgttgggtttttatagttaaggataagtttttatggttaatattagattttagtgattagtattagatgtttatagttagagatgggtttttatggttagtattaggttttagggattagtgttgggattttggatgattgaaggagggtatggttgattaaagttgtaggagttagtttggttattttgaggtattaagttattattgtggttttaggggatttagatttttttatttgtttttttgaattttggaattagatatatttgggtttagtttttgtttttggggttgtgtgtttgggatggttgttttatttttttgaagtttagtgagatggggatggttgtatagggtttggtatagatggtatttgatggtatagggttatttgtttgtatttatatagttttggtttttgttttggttgtgtattgagagttttatgtttagatttttgttgagtttttaagtttttggttatgttttaggttttttgtgagaagtattattgtatggattatgttttgggattttattttgggttgggaagtttgttttatttttttaagttttttttagaggtgttttatgttttattatttttattgtttgaggggttagataggggaatttagtgtgggaggtttagaggtgttggagtagatgttaagtgagttttgtgtttatgtgttgggttttggtagatattttgaatgagttttttttttaggaaggagattggggttttagtttaagttgtggttttaaattttgtgattaagagtggagaaaaggtaagatttttttttttagttttttagaatagttgatagtggtggaaatatggggtttatattgaatttttttgtaatttgttgaagagaatttagtttatatttttaggggtggaggtttggttgatttggtagtgtgtttgtttttttggttatagtttattttggattgggtattttggtgtttttttttagtgatgtagtgaagttattatgatgtgtttagttggtgagaaagtgttttttgtaatgttttattttttttagagggtgaataagttttgtttattataaataattatttatagaatatatgaggtttaatttaattttgggttatggtagtgttttttgggtaaatttatgtgttattttagttagagtttgtgtttttataggttttttggatttattttgaaggggggttggattttttgtttgttttgatgagagggttgtaggatagtttttagtgagtttttttgagggttgtaatttttttttttggtatttttttgtttgttaggaatgttttaagtttttagtagaagtttatttattatagttgttttttattttgtttattattttttttgtttttatttatttagtagattttgtgtatagtttagtgtaggatttagggtgggaaggtgttttgggtgggttggagtaaggtttttagttagggtggggttttaaggtgggtttatagttaggattgtgatttgggaggtttttttttgttttgttttagttttggtattgttgttgtttttgtgtttagtggagatttattggttttaggttttaaaattttagtgaggtttgtagatagggaggagttttatttgagggtagagtgattgttgggtttatttgtttgttatgaattatgtggttttagatttgttatttttttttttttagagttatggttttttgtttgaaaaatggataatgatggttattatgttagggattattttgaggataaatggggatgaaattgaagaggtttagtatggaatttggatatagaagtgttaattgtgtgttattagttgtggtggttgttaaggtttaattatatggtagttatgggttgagtggtgggtgggaagtggggagtaggagtatgtaagatgggtatttttgaagtttttgatttagtgagataagtatatatttagttttaagatggagtgttttaggaaggtggagattgtaaaggttttgtggtgtaggagtgtgagttgtatttttgggttttttagaattttattagagtttagggaggaggttagtttagatataggggtaatgggagagatgggagtgagaaaatggtttggtgtttggaagtggagtttggaaaggtgggtgtggggatagaggagggttttgggggttatgggtttatgtgtttaggaggtggaggtagtgaatggggttatggttggttttatatgtggtattattagttttgttgagtttgtatttgttttttaggttttttgagtgttattattatttggtattttttggtttgatttttgttttttgtttgtttgggaagagtgagattatttgtttaaagttttttagttgtttttaattattttggttgttttttggttttgtttagggttagttgttgatttgaattgtttggtgttatttttttagatttttggggttttgttttggtattaatagttatttttatttttattatttatttgtatatttatttagtagtgttttttgggtatttatttagtaatattaaggtgttgagatgtggttgtggttaagatttgggtttggtttgtgaggattttgtagttgttatttttttagagtatagttttagttaggtatattgtggggtttagaaagagaaattaatatattgtgtttgtttattttgagttgttataaggaatagttgaggttggggggttatttgatttatggttttgtaggttgtataagtggtgttagtatttgtttggtttttggggaggttttaggaagtttttttttatggtagaaggtgaagggggagttggtatgttatatggtgagagagagaatttttagattttttttttttttgaaatggagttttgttgtgttagttaggttggagtgtagtggtataatttttggtttattgtaattttagttttttgagtagttgggattataggtgtatgttattgtgtttggttaatttttttgtatttttattagagatggggttttattatgttggttgggttggttttaaatttttaattttgtgatttatttattttggttttttaaagtgttgggattataggtgtgagttattttatttagtttttttagattttatagtaattagattttttggattttgtgattgtggggagggtattaaattatttatgagggatttatttttatgatttaagttttattttttttaggttttatttttaatattagggattatattttagtatgagatttggaggggataatgtttaaattatattatatgtgatttttttgtgtgtgtgttagtttttatatttggttaagtagtagaagttttttttttgttttttgttgagagagtggtgggggagaaatgatttagggatgggaggttggttttttgaggggttttggtgtttgtggagtgggagtgtgggaaggtttttatgttgtgtgtgttgtgttgggttggttttttatagtttattgtggtgttttttgaggattgttggggaggaaagagttaattaatttggggatttagttgttgaagttattattaaatttgagtagtttaggggtttttttttttttgggttttatgttatttagtatagtggggtttaattgaatttttttttattttttaaggtttttggttggtgtggttggggtttgggatatggggagtgagagggtttgggttttttttagatttggagtgggtttattagaaatggtttaggaaattgtgggggttatttttagtagttgggggtttttgtggttatttttttttggttttgttgagtagttttggtttttggagtttttagtaagggatgtgggggtttgttaggttagggtttttattgttgttgttatgtatagttgtattttgtatttggggagtggggtgttgagtggggtgtttgggaggtaggtttttttttgttttttttgtttagagattttggggatgagttgagtgagatttttttggtttttgattggttgtgtttttgttgttattttttattttttttaagtggaggtttatgatttttttttttatttaaaagggttatttagtgatttagtagattttagtttgtgttatttagggtttttttaaaaatttgtggggaggttgggtttggtggtttatatttttaattttagtattttgggaggttgaggtgggtggattatttgaagttaggagtttgagattagtttggttaatatggagaaattttatttttagtaaaaatataaaaaattggttgggtgtggtggtatgtgtttgtaattttagttatttgggaggttgaggtaggagaattatttaaatttaggaggtggaggttgtagtgagttgagattatattattgtattttagtttggatgatagagtgagattttgttttaaaaaaataaaaataaataaataaaaataaaaatttatggggggatttttgtgtttattggttggtgtgaggagagggtgaggagttgtagagaaggtattaggttgaggattgtttttatttttgggttatagaattgaaggaggggatatatgaaagatgtttttagatttgggttggaggttggggatatttgagggtaaggatgatgttgtttttgtttttgtttgtagaggagtgtatagggtttattagttttttgttgttgtttaagtgatagttttatggagatagaatttatatattgtgatgttgatttttttaaaatttatagtttaatggttttgttgtatttataaagtgattgtattagggttatttagagaaatagaattaatagaaggtgtgtatgtgtgtttagataaagagatttattattatgaggagttggtttattttattatagaggttggtaagtgttaagattggtagagtaaattagtaggttggagatatgggagagtttatgttgtggttttggtgtttatttgaaggtttaagatttaggagagttaatggtgttgttttagttttgagatttaggaaaagtgtatgtgttagtttgagtttgaagtaggaaaaatttgatgttttaggttgaaggtggttaagtgggaagaatttttttttatttaggttttgtgtttttttatttagatttttaggtttttgttataaaattataaagatttgattagaataaaatttgagaaaaaattttttttttttattggttttggatttattggttgggattttggaaattagattgatagagattaataggaaataagtataataatttaagtaagttttatttgatattgagtttttataaggaaatgaagatttagagaaattgttagtttgagtggtttttgttttgttttgagataaagttttattttgttgtatgtttaggttggagagtagtggtttgattatggtttattgtagttttgattttttgggtttaagttggggtttagttgttggttttgggagttgttttgaatttatttttaagttttagtttagatttttaagtagttgggattataggtatgtgttattttgtttggttaattttttattttttgtagagatagggttttattatgttgtttgggttggttttaaatttttgggtttgagtaatttttttgttttggttttttaaagtgttggggttataggtgtgagttattgtgtttggtttaggtttgaatagtttttatttgttttgtttgttttttaaatttgtttgttgtttgttttgagtagtttttttgtttattttttttgtttgttttttgtttaggttggagtgtagtggtatgatttttgtttattgtaatttttgttttttgggtttaagttatttttatgttttagttttttaagtagttgtgattataggtgtgtgttattatatttggttgatttttgtatttttagtagggatggggttttattatgttggttaggttgttttttaatttttgattttaagtgatttggttattttggttttttaaagtgttgggattgtaggtgtgagttgttgtgtttagtttaggtttgagtgtttttatgttgggtttgatgaagagtggaaagttgtgggaaattgtgatagagtaataaaagatgagttgaatagtgagtttgtgggggttttggtaagatttgtgtattggggttttttttagattttttgtttttggagatgaggttgtttttttttgttgggtgtagggagggtattttttatgtgaggggtttatgatttattttagagaaggggtaggttagtgagttttttttggatttgttattttttaaatttttttagttgaaaatatttattatgttaaggtattgtattttggagtgtgtgttttaagttttgttgtttttaattgattgggtgaggtttatttttattagagtatatagtttgttttatttaggtttttgattgtattttttttttgtttgttttgagaatatttattagtagtgtttgtggttgtagtgtttattttaagataaatttgttgggaagtattttgtttttattattatttttatattattttagtatattgattttggaaataaaagatattattttgtttatagtattttatttttagtagtggtattttttttaaaaaaaaatggtaatttttagttgggtgtggtggtttatgtttgtaattttagtatttgggaaagttgaggtaggttgattatttgaggttaggagttggagattagtttggttaatatggtgaaattttatttttattaaaaatataaaaattagttaggtgtggtggtaggtatttgtaattttagttatttgggaggttgaggttggagaattgtttgaatttgggaggtagaggttgtagtgagttgagattgtgttattgtattttagtttggatgatagagtaagattttattttaaaaaataaataaataaataaaatttaaaaaaaaatagtaatttttgattgttgaaaatgttaaattttagagaatatagtatttttataagtgatgttaatattgtttttgattagttgttggttgaagatttatttgatgaatttgatttttttagaatagatgatttagatgattttgttgttttgtttagaaataattgtaggaataatttaaaaaattttttttttttttaatttttttgttttttgagatggattttttttgttgtttaggttggagtgtagtggtatgattttggtttattgtaatttttgttttttgggtttaagtgattttttagttttagttttttgagtttagttgggattataaggtgtttgttattatatgtggttaattttttgtatttttagtagagatggtgttttattaggttgattaggttagttttgaatttttgattttaaataattggtttatgttggttttttaaagtgttgggattataggtgtgagttattatgtttggttagtttttatatttaatttttatatagagtatttagttagatttgttttagttttaaagagtgtgtttatgtaaaattaagtgagtgttggtagtgagttgaattttttaaaaggtaaaagggttaaatattaaatttatttaaaaatatttttatagatatatttagaataatgtttgattggttatttaggtgttttatagtttagtttagttgatatagaaatttttttttttttttttgagatggagttttgttttgttgtttaggttggagtgtagtggtgtgattttggtttattgtaagttttgttttttaggtttatgttatttttttgttttagttttttgagtagttgggattataggtgtttattattatatttggttaatttttttttttgtatttttagtagagatggggttttattgtggttttaattttttgattttgtgatttatttgttttagttttttaaagtgttgggattataggtatgagttattgtgtttggttgatataggaaattaattattatagttatatagttattgttattaattttagtatattttattatttttaaaagagattttgtttttattagttaatttttatttttaattttgggtttttagtttttagttattgtttatttgtttttgtttttatgaatttatttgttttagatagtttgtataagtggaattgtatagtatgtggttttggtgtttggttttttttatttggtagaatatttttaaggtttatttatattgtagtaggtgttggtgttttatttttttttatggttgaataatattttattgtggatagattatattgtgtatttttttatttgttgatggatatttgggttgtttttgttttttggtataattttgttgtgaagaattttgtagtgagtgttggtttataggtttttgtgtgaatatgtttttattttttttgggtaattgtaagattatgtggtttagttaattagtttttaagttatgtgtttgttgagggatttaggtttggtgggggtgtattgttgtgtttggttagttaggtgttgtgagtttgtgttgtagttatttttttgtgttgtgttttgaggttgttttgttggtattgggtattgtgagttttaggaggttaaagttttttttgttttattttgagtttaggttttgttttatgaattaggatgaatggatattgaattaatgtagggatgggtggggttggggtggggatgtagagtgattttgggggtttgtagttgggttttggttgttgatttttagttttttttgtttgttggagtttagaataagttagaaaggggaaatgtaaagtttgagtgttttttttgtggtagattggtaggtttgggtgggtgagttatttgtagttagttgtagtgtgagagaggaagtgggaggggagggagagggtgagtttggtgtaatttatttttggaaggaggttgggttgaggttgggggaagtgatttttatttttttgagaggatttttttttggggttaattttaaattaagggagataagatttttttgggggaggttggaagtgttggggtttttaggtgggtaggttttttagggttaatgttttggggaagttataagttattatgtttttggattgttatatatatatatatatatatatatatatatatatatatatatatatatatatgagtaaattgtaatataaatgtgtgtttatgaaagtgtttattttaaattattatatagtttgtaaagtgaaggttttggtttgtatttgggtatttattgtttagttagttggtaggtagtttgtattgtagtttgttattattttttagagatgtagttgaggagtttagttggtttggagggtttagtgggtgtagttttaggaaagtggttaggtttgggttaggtttttttttttttttagttttgggagaaattattatatgaatgtagtttttttttggagtttgggttggaagggtttgggaggggataggtttttattttaggagtttttaggttttggttgttgtttgtgttagttgtgtgagtgtgagtgagttaggggttattattgggtggaaggaagaagtgggtattttttttaggaggttattgttggagttttatagtaggttaattttaggttttgggtttttgggaggaggagaaagaagagaagtaggaggtgtggagggtaggttaggattagaaggtatatagggttggggtagtgtgggagattttgggggtttttttatttaattagttaatattatagtgtttataagaatatgttattattgtagttttattattttgttttgattttagaaggtataattgatgattttagggaatggagaatttgaggaaggttttgtaggagagggttagatgtgattgagtaaatgtgagttgtttgtaaattgtagagtgtatgtatagtattggttagttttggggttagtgtttttttggtgtttagtttggtttttgtattttttagtgtttggttgggttttgtgggggttagggttgggtttggtatattagaggatttttattaagtttttggtagtgttttagttattaaatttagtttgttagttattaaatttgttttgttggtttttgaattatttttttgttggggttggttatgttatgttaggttttttatgtaggatggtagatggatagatgttgggattaagttatttttgggttgtgagatgtttgattttttgttggtgttttagaagatgttagttttttgtggtatgttttttatgtggtgtttggggattagtggtttttaaggggtttttttgttttagtgtggggagtggtttggttaaggttttagtgtttggttggagttaggtataggtttaggtgtattggttggaggttttttgtttatgggttttgtttgttttgtgtttttggtttttattgtgttttttgtgtttttgggagagattttaggggttttgagtttagtattggggttggggagtgggtggggaagagggtggggattagggtttttggttgtagaatagttaggttttaagtttttattttattttttttttattgggtgttttattttatattgattattttttgaagaaaattttttgaattggttttttattttggttgttttaggaagtttatttatttttttgttttaatgttttgtggttttagaaggatggtggaagttggaaattatgagttttatttataggtggttatatattgaagttgtggagatgttgtgggaaaggattttggttagtgtggttggtatagagggagtggtgttattggggtagatgggaattgtggttgtttttatgttggtttgggagagatgaggggttggatgaaaggatagtagattggttatttatttatttatttatttatttatttatagtgttttattgggtgttttggatgtgtaaggttttgtgggtagtgaatgtgatagattttagatagtaattggagggttatgtgtgtaagaattgagggatttaggttgggtgtggtgttttaagtttgtaattttagtattttgggaggtagaggtgggtggattatgaggttaggagattgagattattttggttaatatggtgaaattttgtttttattaaaaatataaaaaattagttgggtgtggtggtgggtgtttgtaattttagttatttaggaggttgaggtaggagaatggtgtgaatttgggaggtagagtttgtagtgagtttagatagtgttattgtattttagtttgggtgatagagtgagattttattttaaaaaaaataaaataaaataaaataaaataaaaattgaggaatttagtgtagatgagttattttgggaaaataagtgggagttttaggaatagtatggggaagggatggttttggtagggaggatttttgtgggtagttttgttggaagagttgaaaggtagttagagaggttgtgtgtggatggaagttgaagagtaggttaggggtgtgtgttttgttaataaagattttaagtatttattgattaggtataatattatgtgttttataaataaatattttatttgatttttagtatttttatgagatagatgttattattttattttatatgtaagaatattgaggtatagagtggttaagttatttgtttagggttatatagtatgttggtggtaggtaggattttggagttataggaatttggtatattttaggtgtaatggaaattagttatggttttatagagggaaattattagattagtaaattttatatatgttttttggtgttttgaggaggagggatttggataggggtagttaatggtggtggttgtgagatgtgttgggttaatattgatgagagtttgggatggatgagtggatttggagtaatggaaatggagggtttaggtttggtttttggagatttagttgtaatagttgttggttggagaggttgtttatttagatgggggatggggtgggaggtaggtgagatgagagttttagagtttagtttggggtatggttattgggtttaagatgtttttagatgttggggtttgatagtgatagtggttgtagatatttaggatttagtagagggtttggtatagtggggtttagggatatgtttgtgagttaggttggtatttaagtgtgaatttggataaagaaggtggtattgttggtattgaatgtttaggggttgggtgaagttagttagggagaggggtttttaaggtattaggattgattttgtgggtgagggtggaggaggagatggtagaggttgagagaatagttagagataggaggaaggttagtagagttatgtatagaagtttggagaagatttgaggaaaggaagggttgggtggttgttattttttgtagttaggaggtaagggtgatttttgtgtgttttattttttagaggattggtggttttatttggttagaattttaagtttagagatgtatttgagttttatgttatggtgtaggtagtaggagttatggagtaggtttgtggggttatggtttgtttgttgttttttggtgtttttattttgagtttaggggttgtttggatgttttgtgttgtatttttttaggtggtgttttagagaggatgaaagtggttattttaaggtgtgattaggtagtggtttatgtatattgtttttttttggggagagtttgggatggaagggtatgtgtgtgtttttgagattttttgaataggttttatgtatttatttatttattttattatttatttatttatttatttatttatttatttatgtatttatttatttatttatttatttatttatttgttaatttatttatttatttatttatttatttatttatttatttatttatagttatttatttatttatttatttatttatttatttatttatttatttatttatttatttgtttatttatttatttatttatttatttatttatttatttatttatttatttatgtatttatttatttatttatttatttatttatttatttatttatttatttatttatttatttatttatttatttatttatttatttatttatttatttatttatttatttatttatttatttgtttatttatttatttatttatttatttatttatttatttatttatttatttaattatttatttatttatttatttatttattatttgtttatttatttatttatttatttatgtatttatttatttatttatttatttatttatttgtttatttatttatttatttatttatttatttatttatttatttatttatttatttatttatttttttatttatttatttatttatttatttatttatttatttatttatttatttatttgtttatttatttatttatgtatttatttatttatttatttatttatttatttatttatttatttatttgtttatttatttatttatttatttatttatttatttatttatttatttatttatttatttatttatttatttatttatttatttattaatttatttatttatttatttatttatttatttatttatttagttatttatttatttgtttatttatttgttaatttatttatttatttgtttgtttatttatttatttatttatttatttatttgtttatttatttatttatttatttatttatttatatatttatatatttatttatttatttaattatttatttttatttttattttagaaagtatttgaagttgttggggtgtgtatttggaaaatgtgttataagtttttataggtttttttttggtttttttatttttttgattggttttttttttggatatgtaggattttgagtagtttttttgggaggtgggtgtagtttaggtaggttgtttgtaaagttaggattgagggagttatatttaaggtattgtgggtttttaaggtgatggtattgtgggtttattgtttttagatttttttaatttttaggtttttgagtaggaggatttttggggtagggtttggagatgggaagagaaaataattttagttttttaatttttgttagtttaggtgggtgttgtatggattgggggtatttggaatagttggtttttttattttttttttttatttttttagtttttttggttataattagatagttgtgtgtgatgttttttttttttttgaaggggttatttagttaggtttttatttatggtttaggaatgtgtttttttttgtttgttttttatttttaagtaggttgtgtttttagttttttgttgtttttgaagggtttgggtatggggtagtttttgtagtatttttagggtttgagttgatttgtatagtagaagggaattgggggaaagttttttttttatttagtatttggtagggggttattttgttgtattttagagatttttgtttaagttttgttattttagatgattttataagttgggggaggtggagttttagtttttatagtttttgttgttgttttattgttgagttttgttgtgtatttgttgataggtttgttgatagtagaaggggttggagagagggaagttttgggttttgttttttttaatttttgtttaggggatatttttgataagaggaaattttagtttgtgatagatggttagtgtttatttatttatgggggaatttttttttttttttgtaagtttgtagatttgttaggaattaaaggaatttttggttgataggttattgtggatatggttggagggttggtatgggttggattttggggttgttttgaggtaggggttgtttttgttggaaggttttttggggtggggaaggtattagggttattttttgattttttttttgtagtggatttattttagagtttgagataaggtaagggggtagtagaaaatagaatataaaatagttttttttattatatattgtattagaagttagaggatttatttttggtttgttttttttgtagtttaagttttgagagtggttttttaggaagtgaatggtgatggtttgtaggttagagtttgttttggtttaagattgatgttttaataggttgtggagtttgggtgaaaaaatttaggttagggaggtggtgggttgtaaatgaaagaatagaggagggttttttttagaaagtggtgggtggtgtgaggagtttttggattttgtttaaatttgattttattgattggggttaattgaaattgtgttggtagaaaggtaaaattgtttgagatttttttttttataatagaggagaggtttgtttgaaagggtttggtgagggaaaagttggaggaattttggttggtagtaaaagtggggatttttgttttttgttttgggggtgttttggtttttgaatgaatgaaagaggaggttggatggagatagatttatattatttgttttttttaggttttgtaaaggagtatatagggtttttgttggtttttttattttgttagttattaagaaggagaaaatattaataggggaattgtaaagttgtagttttgtttaagttttatagtggaaattggaaagagttttagtttggagaaaaatgtagttttttgtttttgtaaatttgtgtttttttttgggaggttagagttattgtgtttgatttttaagtagggttttagagtgttttaggaggggaaggtagagttttagatttttggtattttaggttttaattaggttttgaggagatgttttttgttttatataaagtgtgaagtgtaatttgatttggagttagttaataaattagatgagttgtgtgtattttaaaaatttagtttttgattttttatttatatatatttgtataatttggttatttatatttagtgtttttatttttagaagagaataggaagtttttagtgatatttatggagtgtttgtagtagtttgggtaggttagtaggaatataatgtagtgaaaagtagagttgagatgggaaaatattttgtttttagagttttttagggatgatattttttattgtttttgtttatttgttttggagtttattttgtaaatagtaatttgtttttatttgagagtttttttttgttggagtttagggatggagagtagttggttttagttttttttttttatttttttgttttttagatttattttttattttgaataattgtttttaatttgtttttttttttttttagttgtagaatttagaattttgtgtgtgtggttaaaagtttagagagtgttgtaggtaatgttgagataattttattaaattttgtaagtttttattatattaagtttgtttgttttttttaatttttattttattttattttattttatagggatggggttttgttatgttgtttaggttggttttgaatttttgggtttaaatgatttttttgttttggttttttagagtgttaagttatttttttaattgggatttatgggtttagggattttttgatgaattgtttaaaatatgtgtgtgtttgtttgtttgtttttaatgtatatttttttagggagagtttttattttttattagaggtttgtggtatatatatgttttgtattattgtattagattgtgaattttttatatgttaaagattgttttaaatttgtttggaagttttggttaataaatatttaaataaatgaattttaaatttttatgtgttattattgtttttattttgattatttttaagtttgtagtgttatttttttgttattgtgaagtagatatttaataaatatttgttaaatgaattaatgttatggttttggtttattaggattttaggattattgtttattattattgtttatagtttttttattattttgttttagagtagttttttttttgaggtttgtttatttttgtatgtgtgtttagtttttagttttgttgttttattatttttttttttttatttgtattttttgaattgttaatagttaataatagtttttttttttatttatttatttatatttgaagtgagaagttattattgaggtttttgtggattttgttagtttaatttggggtggttttttggaggtggagtttttagatgagggatggatattttggtgtttgttgggtagatttatttgggagttttggtaggggttttagggtagttttgtttttttattttggttgtgggatttttggtgtattagggttttttaagtaagtatttgtgttttgggagagttataggtaggtttgagagggtttttggaatttgggatttttagtttggtttagtagttggtattattattttttttgtaagggaagttatggaaattaagatgttaatgtgttttgataggtttggggtggttttaagttttgggaagagttttggtaattttttttggttggtgggtagaatttttttttggtagtttagggttttgtttttagttttttgggggagagtaattgagggaggagttggaggttaaggttttagtgttgagttgtttgtattgtagttgtattttttgggttttggttgtaggaattttatatttttttagtttttttatggtttttgaagatttggtttggggagggggttagtagtttggggtttatttatttggttttaaattttggttttattgtttatttgttttgtgatttttataattgataaaagtttttttggttttggtttttttatttgtgaaatgggataataatagtggttattttataggattgtgtgatgatttattagttataatagtttttgagtagtgtttagagtaatatttggggtttggtgtagtggtttatgtttataattttagtattttgggaggttaaggtgggaggattgtttgaggttaggagtttgaaattagtttgattaatattagtgagatttattttttaaaaaaaaaaattagagtaatgtttggtatagagagtttttagtaaattttggttgttgtgatgagttttgtttttttatttgtttatttatttattagattttttgttggggtttgttgtgagttttatgttgttttgaagaaagttgggttggggtgagtgtgatggatgaggtgtttggttttataaattttgtgtgggggggttgtggtgagaggaaattgtatatattattatttagttattattgtggggagattgtttggatgtagagagtaggttttgtgtgggagtggggagggtaagttttggttgtgaggtagggtttttttaggatttagtagggatttgaaggattttgtaggtatttagggagataggagaggaggagggagtagttttggttggatattgtttttttagtattgtttgtattagggatttatttagttttaagaagtttttttgtgggggatagggagtatttgttagtttataggatttgaagtgtttttatgggtttaagtttttgggaaggtttgtaggtggttgtagggttgttgtaggggtgttggttttagggtttggatttaggggagtttgtagagggagggtagttggaggttgttttagtgtgtattgttatgaggtaaagtaaggagattgttgggtttatgttgggttggggtggatggaggtaaggaagtttttgttggggtaagggtattagttgtagatgttggtagtttttttttggatatgggtttggaaggttgatagggtgtggtgagtgttattggtttttttgttgtggtttggttagtggttttataggtttttgtgggtaggaggaggatgattttgtattttgtttggttattattggtagtgatagataaggtgtgtggggatgtggttattttggtttgtgttttgagagttaggtgtgggttgggtttggggaagataggggaatggtattgatttgattttgagtattttgttttggggtgtaggtttggttgttatttttttggagttgggaatggtattgggtggtggtttagggttttttgttttagtggtattatttttgtatttggttagtaaggttgatgggatttgtgtggatatttttgggatgtagattaggtagtatgatatatagggaggggtaggtagagaagggtggtttttgggttttggtttttaagttaggttttgtaagtttgttgtgttaagtttttttttggtattaggttaggtgggttagggttagttttggggttgtgatgagtgtgagtgtttttaaagtgtgttatgtttaatagttgttttttttttgggtattgttttttagttagatattttatagtttttgttttagttatagatagtaatttgatttttttatttttggtaggttttggggttggggtaagaatttgttattaagtgtagatgtttttagagggtgttggtttagggttgtgtggattatagtttttttatttttgttttagatttatttgtaattttggagaaaagatggtttagtggatgtttgtggggaggagggagttggtttttaggatgagtagatttgggggtagtttttattatgggattggtgatttattgttattagtgttagtgaatggtagaggggttttggtataaggtttgggtttagaatgggaatttgtagagaaattgttaaggttttttgttatttgatatttttgtttggttgttattttagaaatatttttgttgtaagaagatgggggagtttgtttggggtatggtttggtgatattaatttgagaattttaggtttaagtgttggtttttgggttttagttgttttttgagttgtaaagttggtttttgggtatttgtggaaaatattggattttttattttattttattttatattttgggatatatgtgtagaatgtgtaggtttgttatataggaatataagtgttatagtggtttgttgtatttattggattttttaatttagttttattagaaatgattgttttttttttttttttttgttttttttttttttttttttttttttttttttttttttgtttttttttttttttttttttttttttttttttttttttttttgtttttatggggatataatttttatattatattatttgttgatttagaaagtatagttgagtggtatttttttataattttttataagtattatttttaattttagaatgttttttttattttaaaaggaaatgttatttttggtatatagttatttttttttttttagtttttggaaattattaatttgtgttttgtttttatagatgtatttattttgaatatatgattagaattttaaaagatgtgattttttgtgtttggttttttgtagttggaatgtttttagagtttatttgtgttggtgtatgtttgtgtttttttatggttgagaaatagtttgttgtgttgatttagtatgttgggtttttttatgtatttgttggtggatgtgttagttatttttggagttgggtgtgttgtgttatttatgggttgtattaggagttggggatattattgagtaagttatagttttgggtatttaggagtttgtagagtaggagttgggagggaggttaggaggtgtatggtttgtttgttaggttggagagatttgtaaaaagttattttgagttagaaattagagtttgaggtttttgatttttagttgtggagttgggagggaagttttgtattttgttttgattgtggggtgatgtgttagttattgtttaaattagaatttttttgagagttgatgtgggtattgttgataattagtttggatatttgaaagaatggaaagtagggatttagatagatttttgtataattgtgtttgtagtagggtgaggtttggaggtgtgatggggattttaatggggtagttgttgttttgttggagtttatggtttttggggggggttataggtgttaattgtatattatataagtaggagtgtgaaattttagggttgttaaatttagtgagggttttgtgttggtttggttatttatagtggtattttaggaaaaaaaattattttatggattttagtttttttattagtaaagagtaggttggattggaattttgtattatttagtatagttgttatttatgaaatgtggttatttaaatttaaataaaaatagaaattttgttttttagttggattagtttagtgttaagtgtttagaagttatttgtgaatatattgtggtaattttttaaaaaatgaaaattagaattattgtagtattttataattttatttttgggtgtggatttaaaagaatgtatagtattttaaagagttagagatatttgtatatttatatttatagtggttttgtttatagtagttagtgggtagaaataatttgaatgtttgtggttaaatgaatggagaaattaaaggtgggataggttgggtgtggtggtttatgtttgtaattttagtattttgggaggttgaggtgggtggattatttgaggttataagtttaagattagtttgattagtatggagaaattttgtttttattaaaataaaattagttgggtatggtggtgggtgtttgtaattttagttatttgagaggttgaggtaggagaattgtttgaatttggggaggtagaggttttggtgagttgagattgtgttattgtattttagtttgggtaataagagtaaaattttgtttaaaaaaaaaaaaaaaaagggtggaatatataaggaatttgatttagttgtaaagaggaagttaggatatttgtaatagtaagggtgaattttttgggtattatgttaagtgaaataatttggttataaaaggataattttgtaggattttatttatattaggtttgtagagtagttagatttagaaaaatagtagaatggaggttgttagaggtttgggggatggggttggggagttgtttaatgaggatagtttgttttataagatgaaaaagttttggagatttgttatataataatgtgaatgtatttaatattattggattgtatattttaaaatagtgattgtggtaaatgttatgataattaaaaggaaaagttatgtggttagtggttattatgttgagtagtgtaggttttggatggtgttgtggttatagataatggagtgggtgatttttattattgtttttagttgtttgagtattatggtgttttggggttaggatgaaagtgtttttgggtatgggggtttttgttttttttatttgggagttttgaaggtagattttaaagtttatttggttaggtaggagagtgaggtgggtttttgtattgttttttgtgtgtgtgtttgtttgtgggttagttggggtttgtaaggttgttttttgagggaggggttgtaggaatggtttttatttgtgtagaaggtaagttattgttttatgttaatggtaaagatggggtttggttgtgttgtattattattttttaagtggggtttttggtgggtaggatgtttggtttgatttgagtttttgtagtgagtgttggtgtttgtggagggatttagttgtagttgagttggttttttttttgttttgggttttaggggtgttgggggtgagaaaggagagtttagggggtagtgtttttttttaggttttgttggggagggttgagggatgttggggggaggtgggggtgggtaggggttggttttagttttaggtaaaatggtttttagatttataggtagatggaagtgatttttggttatgtgggtggggattgaattgttgttttgtaaggtaaggttttatgtttggttttaggaagtggttttaaagttatatggtttatggttagatgtagggttgtgtttttgtttatttaaaggttttggaagtttaggggagagtatttttgaagggggagtaggagtaggagtaaagttttgaaggtttttaggttgtgtggtttgggtgggggttatgtgggggtatagagagaggagttttggtttttaggtttgtttgtgggtattgtttttagtagtggagatgtgtggatttttttttggtattttttaataaggaattatattgtttttttgtttttttaattttataagataggaatttttgtgttttgtggaggttgagaagatggggaggtgtttgtgaggataaattagtttttagtttttggtttttagagttttttttttttttatttttgatgttttaggtttggggagtttttttttgatattttttgattgttttagtgaaataggttgagagggatggtttgaattggttggggatgtaggttgtagttagggggtttagtgggtattttttgagtttggtttttgttttgtaagtggaagggtagttgaattgaagttttttattgttttttttggtttggaagtttgttttttattttttgggtagagtgaggagtgggtgtgggttgggagggttgttttttgtttgggagggttgtttatttgtttgttatgggggatgagttttttgtagttttttgtgttgtggttttggtttttatgttggttttatttttttgtggttgtttttgttgggtgtttattggttttagggaaaagttattttttttttggaggattggtgggaggggttttgtttgggagtgtgttgtgtggtttttgttttagtgtaggatgtttgaggttagattttttttgggaggtaggatggggtaaaagtttttttgtaggtagagtagggtttggatgggtttaagtagggatgggggtatagaatagtagttgtttagtttgtgtgggagttgagggttattaagggtagttttagtttgtggggattagtagaggtattatttttgtgattagtgagttgtttgtatttgtatgtgtatgtattagtgagtgtggtgagtttgaggtgtgttgggatttggtttgtgtattagttagttttgatgggaattagttttattttgggtatttttggaattttattgtgtgggagtatttgggtttttagtaggtgttttttgggtgtttgtttttagttttaggtttttgatttgtgtgtggtgttttaatagtagttaggagtagggttattgaagggatttatagatagaagaggttttagtgattttgggaagtttagttttatgtgttttatatatttaagagtaaaatttggttttggtttgtgggtgtgtagtttgtgggtgttggttaggtatataagatggttgtttgggttagtttagggggaggtagatgtggtgtaggggttttttttttttatgagtttaggaatagttttgtatttaggtatttgttttgtatttagtattttttttttttttaggattgttggtttgttttatgggattgaatatataattttatggggattgatgttggttttattttttttttttataagattatttatggggatgtgggaggtggggatatatgttggttttatttttgttttttataagattattttttttgtgttttggtttgtggattggtttttaaggtttttgagtggtagtaggtggtatagtttatttgagtagaggtgaaggagagggttaggtttatttgggtggtttgaggtagtgtggagggttaggagaggagagtattttttatttttgtttgagtagttttttagggtatggagataggagtttagggttagttttgttttggagtgtagggggtttttagtttggtatagtttttagaagaggagatgaaaaagtttggttttgggagtttggggatggagttttgttggggaggtagtgtggttgtaggatggtagttttttagaggatattatggttagggatatttatttgggggaatttttaggggttgtttgggtaagttgtttagtttttttgagttttagtgttttagtttttttatttaaggatgggtgtgataattatttggtaggtgtttgtgtgtgagtttttgttttgttttaatttttttgttgttttttttttagttattgaggtggtttttagttgtgttggtgatatggttgatatttttagagatgttgggtttaagtaggtgtttgtattatggaatgagaaggttttggtggattttggttatgtggggattgattttattttggagtagatgtgttggaaggttatgaagtagggttttgagtttaatattatggtggttggtgagtttttattttgtatgttatttaattaatgttggaaattagttttagtttttagggtggtttataagtttttgggtttggtttttttttttgtaaaatggggtagtaattttgattttaaggatggattgttagtgatattgtgtgtgtatgtatgtgtttgggaggagtttatagtttttagtggttttttagaggggtttgttttgtatatttagggtttttgagatgattttggggagtttaggttggtttggagtaggttttgatgagtggttgttgtttttgagtaatgatgttagtttgtgtagagggttttgtggtagttgtttttttattgttgttttagtttggttttttaggttttttattgtattttattgtattttggttagaggttttttagtagtttagttttagttttgttttggaattggggttttgtggtttttatattttttggtggttttggagagttggaggttattatgggaggttgttgattagtatgatttgggtagggtgagggggttaggttggagtttatagtgggttgtttgttgtttttaaagttttttaggttttatttaaattttatagggattttgtgaagggggtgttttgttttttaggtagaagtgaggtttagggaaggttgttaaggttttttagtttatagggtagagaattgtagttattgttttgatttttagaattgtgttttgtttattttatggggtttagggaggggtttggggaagtgtttttgttaggttatattttaaataaaggtgagtttgtggggtttttgtaaggtgtttgggtattttttaggttgggtttgtttttttgatttttgttagttgtgtatgttttttttgtttagttttgtggatgtaaatttatatttgttagtttgatatttttttttttttttttgtattgatttgggttttggtttttttggggttttggtgttttttttgttttttgtagttttatgggatttggttgtttatggttttgttgtgtttatagttgtttggaagttggtagtttgttttaagggagggtggaggtgtggggtttttttttatggtttttattttgttttgtttgttgtgggggatgtgtttgtattttgaggatttagggttgttttttgggaagatggttggagagaaagagaggggagaggtttaaaggtagtggttaggttgggatttatttttgtgggttatggaggggttgttttgttttttagttagggatagggtgagaaggatttgggaatttttgtgttttagttatggtataggtttttttttggagttttggttttaaggagagggagaggtagtttagtagtttttgttttttgtggttgttattgtgatagttttgttttttgggaatggtgtgtaggaggttattttatttgtttgggtttttttgtttttttaattttgagaagaatagtggttttgattttttataaaattatttttttttagggatgttgagtgaggaataagatgtggggtagttttgtttttttttttttttttttttatggtagttgtgtttatttgtagaggtgtaggtaaggtggaggggtatttgtttggaggtttatagattttggggagaattttagttttgttttaatttagtggggtgaggtttgtgtgtttttttttgggttttttttttgtgagttttagtttttttgtttataaaatgggattattttataaagtgagattaagtgagttaggttttgggtagggtttttaataggttgtggttgtttgagaatttgtagtagtggtgatggtggttgtggtgatgaggatgatgggggtggtaatgatggtgatgatgatggggtgatggtgttagtggagatgatggggatgatggtgatggtggtggtgatagtggtgggatggtagtggtgatgtgggtgatggtgattgtgatggtggtggtggtggtgatggaggtgatggtgatagtgattatgagggtgatggggatggtggtggtggtgatggtgatagtggtgggatggtagtgatgatgtgggtgatggtgatggtggtgatggtggtggtggtgattgtggtggtggtggtgatgatggtggtgatgatggtgattgtggtgatggtgatggtggtaattgtgatggtggtggtggtgatggtggtgatgatggtgattgtggtgatggtggttatgatggtggtaattgtgatggtggtggtgatggtggtgatggggatgatgatggtgattgtgatgggggtggtggtggtgattgtgatggtggtgatgtgggtggtggtggtgattgtgatggtggtgatgtgggtggtggtggtgattgtgatggtggtggtggtggttgtgatggtggtgatgtgggtggtggtggtgattgtgatggtggtgatgtgggtggtggtggtgattgtgatggtggtggtgatggtggttgtgatggtggtgatgtgggtggtggtgattgtgatggttgtgattgtgatggtggtggtggtgatggtgatgatggtggtgattgtgatggtggtgatgggagtgatgttggtgattgtggtggtgaagggggtgatggtggtgattgtgatggtggtgaagggggtgatggtggtgattgtgatggtggtgaagggggtgatggtggtgattgtggtggtggtaatggtgatggtggtaaaggggtgatggtggtgattgtggtgatgtgggtggtggtggtgatgtgggtggtggtggtgattgtgatgggggtgatgatggtaatgtgggtgatggtgattgtggtggtggtggtgatggtgatgattgtgatggtggtgaagggggtgatggtggtgattgtgatggtggtgattgtgatggtgatgtgggtgatggtggtgttgatgggggtgatgatgttagtagtggtggtgatagtgatggggatgatggtggtgttgatggtgatagtggtgggatggtagtggtgatgtggttgatgatggtgttggtgttgatgattgtgatgatagtggtggtggtgatgagggtgatggaagtggtgatgatggtgggagtgatgggatgatggtaatagtagtgatggtattgtgatgatggtgttgatggggatggtggtgatgataagggtgatgatgatggtgatgataataataaaagtaataataataaagggatatattttgtagtattttagttggtattttttagatttaaggtgttgtggttggaatattgatataatttttgatttgaggttggttaggatatagatttggtggatagagagagatggatgaggagtgtttgtttttgggttattaaatagtttaggttagggatttttagtattagtttttgtttttttaggagtttatattttttttagaaaggtgttattaaagttagaatattagtgtaatttagggtgttttttgtgttgtgtttttttgagatagggttttattgttgtttaggttggagtgtagtggtatggttttgatttattgtagtttttatattttgggtttaagtgatttttgtgttttaggtatgtgttattatatttggttaatttttgtgttttttggtagagatagggttttattatgttggttaagttggttttgaatttttgattttaagtaatttattttttttagttttttaaagtgttgggattataggtgtgagttattttgtttggttgatttttgtttttttaaaagatagggtttttgttattttggagtggtaatgattttagtttattgtagttttgtatttttgggtttgagtaatttttttattttagttttttgtgtagttgggattataggtgtttgttattatatttagttaatgtttatattttgatgtagagatagggtttttttgtgttgtttaggttggttttgaatttttgggtttaagtaatttttttgttttagttttttaaagtgttgggattataggtatgagttattatatttggtttagggtattttttttggtgtgttgttagtgtagtttaaggtagttttgtgtagggtaaagtaatggggttttgagtttggaggggtgtgtgtgtgtgtgtgtgtgtgtgtgtgtgtgtgtgtgtatgtgtgtgtgtgttatatgtgatttgtttgtgtgtgttgtgagagttgtgtgtgaggtatgtgtaagaggtatgtttgaggtgagttgtgtgtgtgttgtgagttgtgtatgtgaagtgtgtgtgttgtgaggtgtgtgtatgaggtgtatgtgagttgtgtgtgttgtgttgtatatgaatgttatttttttatttttgtttgttttagttatttgtggattggttgtttgtatatatggttattgttttttgagtggtattattttgtaggttagtgttttttagtatatggttttatagattttatgggatatgtgtgagtttgtttgatgtttatattagttttatgggggaaggattgtttattttattttgtagattaggaaattgagatatggtgaggttaggtgatttgtttaggttttggttggttagggaggagtagtttgaatatttgggttttggttgtaattattttggtgaattgtaggaattttggttatttggtgtattttgggtagttttgggtttttttgttagtttggtttttgttttgtttaaaatttgagttattaggagattttttgtttagaaagtataaggggtataagagatgttgatttttttaggtttggtttattttttaggagaggattgtggtttgggttgtgttggtattagagtttggttgtgtgggtttatatagttattggatatttggtttgagggtgaagtttttgggggttgtttggtagggatattgttgggaggtagtttaggtattgttgaattttagattggagagttttgtgtttgggtgggaggggttttatgtgtagattttgttggtttttttggagagatttttgattggttttttattttttttttagggtagagtggtttgggtaaatttattttaattaatattttttttaaatttaaaattagttggaagttggtgtagtttattttagaggagtgtatttttaagattattgagattaagtttattatgtatggttagtggttgggagtgggttgggggtgtaggatgtttttgtttttttggagtataggggttgggggttaagattattatatatagttagtggttaggggtgggttgggggtgtaggatttttttgtttttttggagtatagagtggggggttaagattattatatatagttagtggttgggagtgggttggggatgtaggatgtttttgtttttttggagtataggggttgggggttaagattattatatatggttagtggttggggatgggttggggatgtgggatatttatgtttttttggagtattggtgtggtgtgagggtgtttgagttaggtaattttaggtttttaagatggggatttgttgtgtttattatttttagtatgttgagtatgttggggttttggttgtgatgggttagtgttttggatttttgtgggttttgttatattgagttttttatagataattgagttttttattaaaagtttgataggtaaggggtttttaggggaattgttattggtttgtgttggagttggttgaggaaggttattaattttttggtgtttttttggttgttattgttgtttatttggggttgttttggggttagttaggtgtggggtgtttgtgagggttttttgttttttttttgattttgtgtttgtggttttgtgtagatattgaggagaaaggtgtttggatgaagttgatagtgattgatatattagggtttggggattatattaataatgagaattggtgaggtttttttagggggaggagtattagtgggggttttagggttttttggattttatttagagttagttttagaggttttttggtttgtgggggtgtagggtttattttttgggatttgatatgttgttaaagttgtatgttttaggggtttgaaaattttggattaaagtagaattatttggggaattttgttgtttttaatttattatttgaggttagtttggggaggttggtttgggaggttgagggtaaggttgtggtatttttgtttagtaagttagattttttagggtatgtattttattggaaggtggggtgttgggttttgagttttgggaatgtatgatttgtttggggagggtattttatgtgtttgttgatttgtttttattttttatgtagttggtagtttattatgaagtttattaatgattagtatgagaaatatttgtaggaggaggttaatattaattgtaagaagtgtattttggatatttgtgtttattgttgtttttattttatttttgttattggttatttgtatgtttttgtagtgttggtgtttttatgttgggtgttttgggttttttttgttttttgggattgtaagatggtgttgtttgttttgttgttgggtgtagaggggttgagttaggggttatggttgttagttatgaagttgggggtgtgttatgtttgtatttttaaagttttatattgatttttatgtaagtgttttgtttagtttttattttttagttgtgttttggggagttgagggttaggtaggttttgggttgttttggagtttggtggtttgtgttttgtttttttaggttaggttttggtaggtggagtgggagtttttagttaagtatttgtagtggtgattgatttttttatttgggttttgttttatgggattttttagagggtttggtgtgtttttagatgggaagtatagagattagtgttggttttttttagggttggatggggttgttgttggtgttggtgagagttttttttttttgttggttttgtttgtatttgatgttgtttttagagattagtaagggtgggaggttgtatgtattttggtaggtggattttttatggttttatggattttttgtttttagttttttgtgtattttttgttagatatttgtggtttattttgagttagggttgggaggaggaggattagaggttagtaggagtggttggtggaggtagttgtgggtggtttgtttgtatgggtgggtggagaaggttttttgtatttgttgttttagatgtatttttttgggtggaggaagtttaggggtttggggaaattatattttgtgggtattaggtgtaggaaggagtttggttggtgggtagtgggttttatttagagtttgtgggaaaatttaagttggagtttttgagtttattttttggtattattttttgtgggttagtaggagttaggggtagggggttagtttgttgtttatgggttttttttgaattgaatatttgtttttttaggtagaatggtttatttgtggttttgtggtagttgttttagttgttttaagttttgttttagttgaggttgatggtaggaggtagaagttttttttgatgttagttgggtaagttgagggtgggtgggtggtttgtggtatttttgttattttttagtattgattttttggttgggattttagttaggtatgttgtttggttttgtttaaggtgtttagttttatggggtaggggtgggttttggttatttttgtttaaatttttgtttggagtgggtttttttttagttatgtgtgtgattgatttatttttattgtgggaaaagtttggttttagaattggggaagatggtgttttagttttagggttttgttagtttttgttatttatagttttttttatattagattttaggtttattggggttaagtaggtaaggggagtagtttgtttggtgtaggggagtagtttgtttggtgtaggggtattgtatattggtgttagtttttattttttttgtttttttttttttagttaaagttttatagtaagatggttgttgagttaatgatagtttttttgtgtggatatgtaggggtgtggttgggattttagaatttatggatgagggtgtttggagttggttttggtttgtttggtttgtgtagtggtgttatttgtgtttgggatatatttgtgttttttttttgttttatatttatagtgtggttgatttggtttggggttttgtttttgttagtagggatttttgtgagttttgagttagtatttgagagtgttgatatttgtttgggggtgggtgtttttttattgttttgtttttttagatgagttttatgtatatttttttgttttagttttaggtttttggatattgagtttatgaaatgtttgagtaaggtggttaatattgtttttgttattgttaaggtggatatatttattttggaggagagggtttattttaaatagtgggtagggttttatttttatttgttttagtttttttgtgtaatttggagatgttgtaggtttggtaggggttattttgtttaaaggagttatattgttagggagattgaattgttggttattttttttagtgggtggttggtttggtggtttttggtttaggtggttgttgggggttgtttttgagatggtttttttagtttttttatattttaaaagtagttttgtgggagtgttaattttttagtagagtttttgaggggggttttggagaagatttggattaggtagatggtgaattttttttttagggagtgaggttgagtaggggttgtgtgatatggtttattttgttttatgttttttttttttttttttgagaaagggtttggtttagttgttaaggttgtaatgtagtggtataattatggtttattgtagtttttattttttaggtttagtttttgagtagttggaattatagatgtatattattatgtttggttaatttttgtatttttagtagagatgaggttttgttatgttgtttaggttggtttttaatttttgggtttaagggatttttttgttttagttttttaaagtgttggggttataggtatgagttattttattttgttttgtttggtttttattagatggaagagaagttgggttaggtgtggtggtttatgtttgtaattttagtattttgggaggttgaggtgggtagattatttgaggttaggagtttgaggttaatatgatgaaattttatttttattaaaaatataaaaatattagttgggtatggtggtgggtgtttgtagttttagttatttgggaggttgaggtaggagaattttttgaatttgggaggtggaggttttagtgagttgagattgagttattgtattttagtttgggtgatagagtgagattttattttaaaaaaaaaaaaaaaaaaaaaagttttaggagggatggtttttgttatttttttttttgttattgtttgaggtttttgttgtgggatagggaggggtatttaagtaagagggtagttttgggtttttttttttgatagggtagtatattagagttatatggggtgttttttaaaatgaaattgaggtgtttgggttgtggtattatatttgttttggtgggtgtgggtggggtttgtaatttattttgttttggggttaggtgttagggatttttttagtatgtgtaggggaagatagtttatataaagtgggtgtgtttgttggaggttatatatgggttgtggtttgtgtttgggtaggtgagtagttgtttattgggatgtttttgttgtatgtatttatgttgggttgttggtagggagttgagaggttattgtaggtggggtttttgttggaattggggattgtgatgagggttttttaggaagggttttaggaggggaggttttggtaattttgagtatttttttggggttgtgatgagtaggagaagagaggtgggaggtgtttaggatgatgattttaagtttttggggagttgtagtgttgtttaggatagtaggtgtatttgtagttgttttttttttttttaggaggtataggagttggaggtgattggtgttatagttttttagagtttgtttttgaatttgagtttggggtagtatatagtgtggaggttatgtggtaaatattagtgggtgggtagagtttgttatagggatgggtttatttttttttttttttattttagattattgtagatttgttgtttaatggtattgatgtgtatttttagaaggaatttgatgaggatttggaggattggttggtgaatgagaagttttgggtgagtggatttattaggatgttgtttttaggggatttttagtttttgttgaagggtgggttgggggtttggaggattttaagttatgaaattatatttttggggttagagggtattgagtttaggtgtttgtatttagtgttgttaggttgaggtttttgtttttgggggattttaggtttagggtagttttttttgggggtttaggggagggaattgtttttttgtatatgtgtaattaatattgtttgtttgttttttaggagatgattttatttgttgtggtgggtagtgattatgagtattaggttaatggtaagaggatttttgggaggaagattaagtggggtattattgaaggtatttgttgtaggtgttggggttttagatagatgggaagatagttttttttgttgatttagagtttgtgggttatgtttgagttagggatttgtggaattttatttattgttttgttttatttagagggaggggtttttttgtttttatttaatttttgggaaagtgagagggtaagtggtttgtgtagatgtttttattttagatttttttttgggtagggaaagatttagggagataggagttgggatgggggttgttaagttttggattttggtgtaggtttttttataggtatttgtgtggttttggataaattgtttaatttttttgggtttagaaaaggggtgggttgtagttttgtgagttagatggatttttggttttttattttgttgaagtttttgggatttttatattttagttttttgagtggttgttgtaattaattagtataaatgaggggatttaaaataatataaatgtatttttatagttttagaggttagaggtttgaaattaggggttgtttttttttgaggttttgaggattagttttatttatgtttttttttttttggtggtgtttggtatttttagttgtattgtaaaggtattatatgttttaatttttgttttattgttatagggtttttttttttgtgtttttgttttgttttttttttttttttttttttttttttttttttgtttgagatggagttttgttttgttatttaggttggagtgtagtgttgtaattttagtttattgtaatttttgttttttgggtttaagtaatttttttgttttagttttttgagtatttgggattatagttatgtattatttatttgatttaatttttgtatttttagtagagataggattttgttatgttggttaggttggttttaaatttttgattttaggtgatttgtttattttgtttggttttttaaagtgttgggattataggaatgagttattgagtttgtttttttttttttttgtttttggataaggatgtttgtttttggatttagggtttattttaagtggatgattttatttggagatttttaatgaatttataaagaaagatgttttttaagtaaggttataattatgggttttaaggtttggattttgattatgtttttgaatggatgggagtttttggggggttatagtttaatttatttttggtggtgatattttgggagggatgggtttgaatgttttttttttttttttttttttgtttttttattttttattagaatggaagaggggaaggtgtagagggaaatgtagtaggaaaagttattttgttttgggagagtatttggttgaaaggtttagtagagtaggaagtataagttttttaattttttagggttttagtttttattatttataaagtgggtgtagtgtgttaagattttagtgagttgagagattgttttaaagattatagagttttttgggaagttgttgttttaaaaaaatggttataatgataattattaggaggtattagatatttttgtgttattggttagatatgggttattttgttttatgtttgaagttttttgtatttattttttttgtagagttgaagaggtgttgtgagtagaaaatttgttaagggatttagaatgggaggtggttttagaatttatagttttagttttgtattagatttttttgagatgggagtttatgtttggaggagggtgtggagaggtatatgggttttttttttgtttgtattttttttttattattatttttgttgggtttattttgtgggagttgtttagttgggtgtagtttgggtgttttttagtatttgtttgtggtgttaggttggtttgtttttttttggtttttttgtttgtagtttttttttttttttttgtttaaagagtttttgttgtttaggaaattttttatgaaaggtaggtttgggagagttagggatggatgggtttgggatgggttggtggttttgttatgggtgtgtttttgttgtattttggtggttaattttgagtattgtaggtggttggtgatagaaattgttaggaaatgtataagagagaggtttttgtatttttttgatttgtgtgttgttgagtattattggttttagttgaggaagagtttggaatttgttaggatagttgtgaggtggtggggtttattttttagtagttttatatgaggattttggaaatgtgtttttagtattgttgggtttttatattaggggttttatgagtttatagttgatttgatatttggattagtaagggttgtgttttgtttttgttttttatttggtgaatagtattttgaggtattttttttatttttagaaattattttaagtattgttaatagaaatgtggggtgtaattgattatgttatgaatttatttaatttttatgtttttgagaggtgggtgatgttattatttatattttatggatgaggaaattgagggaatgagagtaatttgtttgagttagggagtggtgattatatattttaattttagtttgagagttttattttttttgttggtttttgttgtttgttagtgttagatgagagtgttgttggttagtttgtaggaggttttagtgtggatattgttttatatagggttgtggtaggagggtttaggtaaaggtaattggtatagtattgagagtatttgagggttgggtaaggtggaggttttggttttgtttgttggtttattaagtaaaaattagatatttttaatttggggaaaagttatgtggttttgtgatggggtagtttggagttaggtgtatgggttttgtattttgttttagttttatgtattgtggagttgagatagatatagtttttgtgttttttatgttttattttttttttttttttttttttttttttttttttttttttttgagatgaagttttatttttttgtttaggttggagtgttgtggtgtgattttggtttattataatttttattttttgggttttagtgatttttttgttttagttttttgagtagttgggattataggtgtttggtattaggtttggttaatttttgtatttttaatagagatgagattttattatgttggttaggttggttttgaatttttgattttgtgatttatttattttagttttttaaagtgttgggattgtagatgtgagttgtggtgtttagtgtttatgttttatttttgtaagataatggggataataaaggaattataagagatatttgtaggtgtgtgaagatgaagtttattatatgggagggtattgggtgtttttatttgttttttttgtttggttttttatttttagtgatgttgtttattgttttttttgttaaaaggttttttgttatataatagttatatatgttaggtattgtgtgtttatataggagttatgaagtatagtaataaaatgattattttgagatggttattagtttgagtttgagggtatttgtgggtgtttgtggttttttgtttagtttttttgagaagtggttattgttttgagtttgggtttgtatgtattgtgtgaagtgtatatgtttttgagtaatgtttagtattgttgatttttgagtttgtgaatggttgtttatagtatgtagtttttgtgtgtgtttttgtgtgtgtgtgttttgagtgtatataaggtggatggggttgtgggggtaatattttgtgggttataggttttttttaaaattttagttttgatttttgttttattttatttttagtagtttagttttttgtttgtttttaggtttttgttgggatgttttgttttttttggttattttagtggtgtgggggtttattgttttggtttttttattgtggtttttttttatgtttttatttggtttggttattgtgttattttttattagttaggaattttttggagagtaggagttgagttgtttaggagtaggagttggtgttggttattttagtattttttagattgagggtagtgttaggtgttttatatttagttgtagagtaggtggtttttttgtttttttgtttatggggttgtttttagattttgtttttggtattagtatttttgggtagggggagagaggtggggtttgggtagagtttttttattgggatattaaagttttttttgtttttttttttagttgaaaatattatatattgtgagtttgtttatttgtgggatttttttattaggtgagagatagggtgtttgggtggggttgatggttttatttttaagagggttttatagtgggtgggggtagtgggtgtggggttgaagttttgggtagagtgggtgttttttgttatttgtttgttttgtttttgggaagattttggaagtttattttttgaaaaagaaaatttattgggaaatgaagtaggtagtgaagattttttttaatttttgtgaagttggttggatgggaaggttgagttttgatttattgtggtttggtttgttagagttgtttggtggttattaagggtttagtgaggttttatgtgtaggttttgttggtagtgtggggtgtttttagttttgattttattggtttttgatttttattttttttatttggttgaggtttttttttgttttttttgagtttaggtaaggaggggaagttttgatggagagggtgttgggtgggtggtttttggagtgtgggttttggtttgggtaggtttttttttagtaagtagttggtatggatgatgggaatgttattaagaggaggggtttttaggttggtgggggtaggggtggggggattttgggagttgttttgttattgtggggatattgggttttttaatttttttttagattattttttttgagttgtagaggaatgaaaatttgagtttaggattttttttttttggggataagggtaatttagttttttgttttaggttatttgtttgttataggttatagttttggaggttggtggttatttattgtttttattttgttagtattttggatattggtttggagtaataatgttttagttttgtttttttgagtttatgtattgtttttgggttttggatttagggttatagggtggatttagagggagatatatgtattggaatatgtgtgttttgattgagtttgggtttattagggggattgattttttttttaaaatgtgtattagatttggtttaatatggtgggtttgggggattttatggggagttaagtagttgggatggggagtgggggtgggggtaggtgggtttgagtttgaggtaggttgagtagggtttttgttttgttgtttttattttgttgtgtttattttattgatttgtttgttttttatttttataggatgtatatgtagaatattaaggatattattagtagtatttattttgaggtgtattgtgtgaagtgttttaatgagggtagtagtgttatggttaatggtatggaggagaaggagttagaagttttggagatgtagatgttattttgtttatttttgggattttgtttttaagttatttttgtttttttttaggtttttttattattttattttattttatatgattttttttatttgttattgttttttatttttttgatatgttgttaggaaataagggaaggggtttttttttgagtgagttagtgatgaggttgtggtttttttgaggttgtggggaggttgtattggagttataggtaggggtgagagtatttattgaattgatatgattttttgtttttaggtttggttttttgagggtttagaagagtagttttggtgtgtagattatttgtttgtgtggggtttttagtgttggaggttttggggtgggggttaggttttgtatttgtagaggagtttagtgggttgtatgtttttttttatttttattggttttgttttttggagtgtgttagagtttaggggagaatgtagtttattaggagtatttggattttttgtttgttatatggtgtggttattatttagtttttatttttgttttgtttttaagggtagaaaattttagggttttttgttattgattgtttagttattttaagttttttggtagttgttttttttggagtagaaagtgtttttattttagttatttgtagattgtttggttagatgtggggataggttggaatgagggaggtgtttttatttttttgttattttttttttatgttatttttgtttttattgggttgtaggtgttgttgatgtgttgggatttgattgaggataaaaaggaaggagagatgatttttatttttttattttttagttttgaaaaggtttaagtaagtgagtttggtggaggagttgagggagggagttatggaaggtgttagaaggaaggttggtgggggtatgtgtgggttgtggtttgggttggttagagtggtgtgagttgtttggtgtttgttttgtttaagtgattagggaagtgtgtgtgtgtttatgtgtatgtgtgtttgtttgtttgtttagtgtttgggtttggtttaagattgggttgtagttatattaatgtttagttagttatttttgttatttattttttttggtttaggttttgttgattttttgagttggggaggtgggaggttaggtgagtttgattttgttgatttatttgtgtttgggtttttttttttagagtttatggtaatgaatttttagaaaggagagaatgggtgttaggggtgtatagtttatagttgaagagtaaggttttgtggtagtatggtttggttttttattttttgtttttatgaggggatttatgggggttgtttttgtagggtatagatgattaaagtttttttttgttttttgttatttgttttgtttttggggagaaagaggggtttgatgagattttatttaggtgtatatattattaggtgtatttgtaggtattgggttggttgtttgtagttaggagaaggttagtgagaaggagtgtatgagtgtgagtgtgtgtgtatggaagttggggtattgggtgtttgattttttttttatttaagagaggaaggattttttattatttttattggtgagatagtttattttgttaatttgttatgtttttgttaaaattaagattttgaaggaaatgagtggttagtgttagggtttaggttatgtggtttgtttagttttaatgttatttggtggtggggtggggtgggggtgggtagtagtattttagttttgagatgttttattttttttttttgtaattagattttgaaaaattgtttgttttattaggttttgttttttaatggttttttgttatgtgttttttgagaaatttgtttttttgtataaatgataaagtgttgaaaatgtattttttgaaataaatgttttaaatgtagaaattta

SEQ ID NO: 11 - DNA, 219909 bp, Artificial Sequence
  chemically treated genomic DNA (Homo sapiens)
tgggtttttgtatttgaaatatttattttaggaaatatatttttaatattttgttatttatataaaaagataaattttttgggaggtatgtagtaaaaggttattgaggaatagagtttgatgaaatgaataattttttaaagtttggttatagagaaggaaagtgaagtattttaaggttgggatgttgttgtttatttttattttattttgttattaagtgatattgaggttgggtaggttatatggtttgggttttggtgttggttatttattttttttaaaattttggttttggtaaaaatatggtaagttggtaaagtaaattgttttattagtgggggtggtgaggggtttttttttttttgggtggggagggagttagatgtttagtgttttaatttttatgtatatatatttatatttatatatttttttttgttgatttttttttggttgtaagtagttagtttggtgtttgtagatgtatttggtgatgtgtgtatttgagtggagttttattaggtttttttttttttttaggagtaagataggtaataggaagtaggaagggattttggttatttgtgttttgtaaagatagtttttatgggtttttttgtggggatagagggtgaggggttgggttgtgttgttatgaaattttgttttttagttgtggattgtgtatttttgatgtttgtttttttttttttaggggtttgttattatgggttttgaggggaggggtttaggtatgggtagattaatagagttaggtttgtttggttttttatttttttagtttagagagttagtaaggtttgggttaggaagggtgagtggtaggggtggttggttgggtattaatgtaattatagtttagttttgggttaaatttagatattagatagatagatggatatgtatatatatggatatatatatatttttttggttatttgggtagggtaggtgttgggtagtttatgttattttgattagtttaagttatggtttatatgtgtttttgttaattttttttttggtattttttatggtttttttttttagtttttttattagatttatttgtttagatttttttaaaattgggggatgagggggtaggggttattttttttttttttttatttttaattagattttagtgtattagtagtatttgtagtttggtgggggtgggggtggtgtgagagggggatggtagggagatgaagatgttttttttattttagtttgtttttgtatttggttaagtagtttgtggatggttgagataaaggtattttttgttttaggaggggtagttgttagggggtttggagtggttgggtagttggtggtaggggattttggagttttttatttttaggagtagggtaggggtaggggttgagtgatggttatattatgtggtgggtagggggtttaggtgtttttggtgggttgtatttttttttgggttttgatatattttaggggatagggttgatggggatggaggggagtgtgtagtttattgggtttttttgtaagtgtgaggtttggtttttattttaaggtttttggtattgagaattttatatagatggatgatttgtatattgaagttgtttttttgagtttttggggagttaggtttggggatagagggttatgttaatttagtgggtgtttttatttttgtttgtggttttagtgtagtttttttataattttggggaggttgtggttttattattgatttatttggagggaggtttttttttttgttttttggtagtatgttgaaggggtggggaatgatgataaatggagaaaattatataaaataaaatggggtggtgggagggtttggggggggatggaaatgatttgggggtaggattttgggggtgggtagggtggtgtttatatttttggggtttttggtttttttttttttatgttgttggttatggtgttgttgtttttgttgaggtgttttatatggtatgttttgaagtggatgttgttggtgatgtttttgatgttttgtatgtgtgttttgtgggggtggggggtgggtgggttagtgaggtgggtgtagtggggtgggggtagtggggtaggggttttgtttggtttgttttggatttaggtttgtttgtttttatttttattttttattttgattgtttggttttttatggggttttttaggtttattatgttggattagatttggtatatgttttgggggaagggttagtttttttggtaagtttagatttggttagaatatatatattttagtgtatgtgtttttttttgggtttattttatggttttgggtttagggtttagggatagtgtatagatttagagggatagggttggagtattgttgttttaggttggtgtttagggtgttggtagggtggaagtagtgggtgattattggtttttaggattatggtttgtggtaggtaggtggtttggggtaaagggttgggttgtttttgtttttaggaaaaaaaagttttgggtttggatttttatttttttgtagtttaggaggaataatttggagggaggttggaaagtttagtatttttataatggtagaatggtttttggaatttttttatttttgtttttgttaatttggaggtttttttttttgataatatttttattatttatgttagttgtttgttgaggaagaatttgtttaggttagggtttatattttagggattatttatttagtattttttttattagggttttttttttttgtttggatttaagggaaataaggagaagttttagttaggtgaaaggggtaggggttagaggttagtgggattggagttggagatgttttatgttgttggtagggtttgtatatgaggttttattgggtttttagtggttattgggtagttttaatgggttagattatagtggattaaagtttagtttttttatttagttaattttgtaggggttgaaaaggatttttattgtttgttttattttttagtgggtttttttttttagaagatgggtttttaagatttttttgagggtagggtaggtaggtggtagggggtatttattttgtttagggttttggttttatatttattgtttttatttgttgtagggtttttttaggggtgaagttgttagttttatttaagtattttgttttttatttgatgagaaggttttgtaggtaggtaaatttatagtgtgtggtgtttttaattaggagaggagataggaggggttttaatgttttagtggagaaattttgtttggattttatttttttttttttgtttagaaatgttggtgttaaaagtagagtttgagggtagttttatgggtaggagggtaggggaattatttgttttgtagttgagtataggatatttggtattgtttttagtttgggggatattggagtgattagtattagtttttgtttttggatagtttagtttttgttttttagaaagtttttggttaatgggagatggtatagtgattaggttaaataggagtatggaaggaagttatagtggagaagttagggtagtgggtttttgtattattggggtgattagggagagtaggatgttttagtaggggtttgaagataggtagggggttgggttgttgggaatgggatgaagtaggaattggagttgggattttaaagaaaatttgtggtttatagggtgttatttttatggttttatttattttgtgtgtgtttagagtatatatatatagggatatatataggggttatgtattgtggatgattatttataagtttaagaattagtaatgttaaatattgtttagggatatgtgtattttatataatatatataagtttaagtttgggatagtggttattttttagggagattgggtaggagattatgggtatttataagtgtttttgggtttgagttggtggttattttagagtggttattttattgttgtgttttgtaatttttatatgaatatgtggtgtttggtatgtgtaattgttatataatagaaggttttttaataaggagggtagtgaatggtattattggaggtggggagttgggtagggaaggtaaataaagatatttggtgtttttttatgtgatgaattttgtttttatatatttgtaagtgttttttgtgatttttttgttatttttattattttatgaaaatggggtgtagatgttgggtattatggtttatgtttgtaattttagtattttgggaggttgaggtgggtggattatgaggttaggagtttgagattagtttggttaatatgatgaaattttgtttttgttaaaaatataaaaattagttaggtttggtattaggtgtttgtaattttagttatttaggaggttgaggtaggagaattattggaatttaggaggtggaggttgtggtgagttaagattatgttatggtattttagtttgggtaaaagagtgaaattttgttttaaaaaaaaaaaaaaagaaaaagaaaaagaaaagaaaagaaaatgaggtatagagaatgtaagaattgtgtttgttttagttttatagtgtataaggttggagtgggatgtagaatttatatatttggttttaggttgttttattgtagagttatatggtttttttttaagttaaaaatgtttagtttttatttggtaggttagtaggtagggttggggtttttattttgtttagtttttaagtgtttttagtgttatgttggttgtttttgtttaggtttttttgttatggttttgtgtagggtggtgtttatattagaattttttgtagattgattagtagtatttttatttaatattgatgggtagtgagagttggtaggaagaatggggtttttaggttggagttggagtgtgtgattgttattttttggtttgggtaagttatttttatttttttagtttttttatttataaaatgtggataataatgttatttgttttttagggatatgaggattaaatgagtttatggtgtgattaattatattttatatttttattgataatatttggggtggtttttaaggatgggaaagatattttaagatgttgtttattaagtgggaggtaagaataaggtatagtttttattagtttgggtgttaggttagttatgaatttatggggtttttgatataaaaatttagtagtgttgaaggtatatttttagggtttttatataagattgttggaaagtgggttttattattttataattgttttgataggttttagatttttttttagttggagttagtggtgtttaataatgtataggttagagaggtgtggggattttttttttgtgtattttttgatagtttttgttattggttatttgtggtatttaaggttggttattagggtgtagtagaggtatgtttatagtaaagttgttggtttgttttaggtttatttatttttaatttttttaaatttgttttttataaaaagttttttaaatagtaagaattttttgggtagagaggaagagaggaattgtaggtagaggggttaaggggaggtaagttagtttgatattataggtggatattggaaaatatttaggttgtatttagttgggtagtttttgtagggtgggtttggtaggggtggtggtaggggaggagtgtagataggggaaaggtttgtgtgtttttttatatttttttttaggtatgaatttttattttgagggagtttggtgtagggttggagttgtagattttagagttgttttttgttttgggttttttggtaggttttttgtttatagtatttttttaattttgtaaggagggtgggtgtggggagttttggatatgaaatgagataatttatgtttagttagtggtataggagtgtttgatgttttttggtaattgttattatgattatttttttagagtaatagttttttaaaaagttttgtggtttttgggatagttttttaatttattaaaattttggtatattgtatttattttgtggatgatgaaaattgaggttttggaagattaagagatttgtgttttttgttttattgggttttttagttaagtgtttttttagaataaagtggttttttttgttgtatttttttttgtattttttttttttttattttaatgagaaatgaagggatagagagaggaaggggaaggaaatgtttgggtttattttttttggggtgttattgttaggagtgggttgaattgtggttttttaggggtttttatttatttaaagatatggttaaggtttaggttttggaatttatgattgtgattttatttggaaaatgtttttttttatagatttattaaggatttttaaatgggattatttatttagggtaggttttaagtttaaagataggtatttttgtttaaagataagaaggaaagagggtaggtttggtggtttatttttgtaattttagtattttgggaggttaagtaaggtgggtagattatttgaggttaggagtttaagattagtttggttaatatggtgaaattttgtttttattaaaaatataaaaattaagttaggtgggtggtatgtgattgtaattttagatatttgggaggttgaggtaggagaattatttgaatttaggaggtagaggttgtagtgagttgagattgtaatattgtattttagtttgggtgatagaatgagattttgttttaaataaaaaaaaaaaaaaaaaaaaaggaagaggagggatgggatagagatatagggaagaaggttttgtgataatggggtagagattagagtatgtgatgtttttataatataattaggaatgttaggtgttattagaaggaggaaggtatggatgaggttggtttttagggttttagaaggaaatagtttttgattttggatttttggtttttggaattgtgaaaatatgtttgtgttgttttaagtttttttgtttgtgttaattggttataatagttatttaagagattaaggtgtgagggttttaggaattttagtagggtaaggggttgagggtttatttggtttatagagttatagtttattttttttttaggtttagagaggttgggtgatttgtttagggttatataggtgtttatgaaagagtttgtattaggatttagaatttggtggtttttattttagtttttgtttttttgaatttttttttgtttggggggaggtttggggtggaggtatttgtataggttatttgtttttttatttttttaagggttgaatggggataaggagatttttttttttgggtggggtaaggtagtggatgaggttttatgagtttttggtttaggtgtggtttataggttttgggttagtagaagagattgtttttttatttgtttggagttttggtgtttgtggtgagtatttttgatggtattttatttggttttttttttaaggatttttttgttgttgatttggtatttgtggttattgtttattatagtaaatgggattattttttggggaatgggtagatggtattggttatatatgtgtgggaaggtaatttttttttttgggtttttgggaggagttgttttgagtttggggttttttaaaaatgagagttttagtttgatagtattgggtatagatatttgggtttagtgttttttggttttaagaatataattttatggtttaaggttttttaaatttttaatttattttttagtaggaattgggggttttttgggaataatattttagtggatttatttatttggaattttttgtttattagttggttttttgagtttttattaaattttttttgggggtatatgttgatgttgttggatagtaggtttgtggtgatttgggataaggagggagagagatgggtttatttttgtggtaagttttatttatttattggtgtttgttatatgatttttatattgtgtgttgttttaggtttgggtttaagggtaggttttggggggttgtgatattaattatttttaatttttgtgttttttggagggaagaggggtagttgtaggtgtatttgttgttttgagtgatgttgtaattttttaggggtttaaggttattgttttgagtattttttatttttttttttttgtttattatagttttaagaaagtatttagggttattgagatttttttttttgaaattttttttaaaaaatttttgttatagtttttagttttagtaggggttttgtttgtagtaattttttagttttttgttagtagtttgatatgggtatgtgtaatagaaatattttagtgagtggttgtttgtttgtttaggtatagattatagtttgtgtgtagtttttggtagatatatttattttgtgtggattgtttttttttgtatatgttgggaaggtttttgatatttggttttaggatggagtaggttataggttttatttatatttattgaggtagatgtggtgttgtagtttaggtattttggttttattttgaaaggtattttatgtggttttgatgtgttgttttgttaggaggaagagtttagggttgtttttttgtttggatgtttttttttattttatagtaggggttttagatggtggtggagaagaaggtggtagagattattttttttgaaatttttttttttttttttttttttgagatggagttttgttttgttatttaggttggagtgtagtggtttaattttggtttattgaagtttttgttttttgggtttaagagatttttttgttttagttttttaagtagttgggattataggtgtttgttattatgtttgattaatatttttgtatttttagtagagatggggttttattatgttggttttaaatttttgattttaagtgatttgtttgttttggttttttaaagtgttgggattataggtgtgagttattatatttggtttagttttttttttatttaataaaaattaggtagggtgaggtgaggtggtttatgtttgtaattttagtattttgggaggttgaggtaggaggattttttgagtttaagggttagagattagtttgggtaatatggtaaaattttgtttttattaaaaatataaaaattagttagatatggtggtgtgtgtttgtaattttagttatttggggattgagtttgggaggtggaggttgtagtgagttatgattgtgttattatattgtaattttggtaattgagttagatttttttttaaaaaaaaaaagggggggtataaaataaggtgggttatgttgtatggtttttgtttggttttattttttggaagagagatttattatttgtttggtttaggttttttttaaaattttttttagagattttgttggagaattggtatttttataaagttgtttttgagatatgggggagttggagaggttattttagggatggtttttagtagttatttgggttagggattattaggttagttatttgttggggagagtgattagtggtttggtttttttgatagtgtgatttttttagatggggtggtttttgttaggtttgtagtgtttttaggttgtatagaagggttggggtaagtagagatggaattttatttgttgtttgaagtggatttttttttttagggtgagtgtgtttgttttggtgatgatagggatgatgttgattattttgtttaggtgttttataaatttgatgtttaggggtttgaggttgaagtagagggatgtgtgtgaggtttatttgggggagtggggtagtgggggggtatttatttttaagtaggtgttgatatttttaggtgttggtttggggtttatgggggtttttgttggtaaggatagggttttgggttgagttggttatgttgtgagtgtggggtagaggaaggatatgggtgtgttttagatataggtgatattattgtataggttaggtgggttagggttagttttaagtatttttgtttatgagttttggggttttaattatatttttatatgtttatatagaagggttgttgttggtttagtagttgttttgttgtggggttttggttgggaggggagaggtaagagaaatagaagttagtattagtgtgtggtgtttttgtattaggtgggttgtttttttgtattaggtgggttgttttttttgtttgtttggttttagtgagtttggggtttgatgtggggaaagttgtgggtggtaggggttggtagggttttggaattggggtattattttttttagttttggagttgagttttttttatagtgagaataaattggttatatatatggttggggagaagtttgttttgggtagaagtttaagtagagatggttaaggtttgtttttgttttatgggattggatgttttgggtgggattaggtaatatgtttagttggagttttagttaaagggttagtgttggggagtggtagaagtgttatagattgtttgtttgtttttggtttgtttagttggtattaggagaggtttttgttttttgttattagttttagttgaggtaaagtttggagtagttggaatagttgttataggattgtaggtgagttgttttgtttgggagggtagatgtttagtttaggagaggtttatggatagtgggttggttttttgtttttgatttttgttggtttatagaggatgatgttagagggtgggtttgaaaattttggtttgggtttttttatagattttgggtgaggtttgttgtttattagttaggtttttttttgtatttggtgtttatagagtatggtttttttaaatttttgggttttttttgtttagggaagtatatttgggatagtaggtgtgaaggattttttttatttatttatgtagataagttatttatggttgtttttattagttatttttgttggtttttggtttttttttttttagttttggtttagggtgagttataggtgtttggtagggggtgtatagggagttgaggatagagggtttgtgaggttatgaagagtttatttgttagggtatatgtagttttttgtttttgttgatttttaggggtgatgttaggtgtggatagagttggtgggaggaaagggtttttattaatattaatagtagttttgtttagttttggaaggggttagtattgatttttgtgttttttgtttaagaatgtattaaattttttaaggggttttatgaggtagggtttggatgagaaggttagttattgttatgggtgtttggttgggggtttttattttatttgttagagtttggtttgagaaggtaggatatagattattaggttttagaatagtttagggtttgtttgatttttagttttttaagatgtagttgaaggatgggggttgggtaggatatttgtataggggttagtgtgaggttttggaggtgtagatatggtatatttttaattttatagttggtggttatggtttttgatttagtttttttgtatttagtagtagggtagatagtattgttttgtagttttaggggatagagggaatttagggtatttggtatgaggatgttgatattgtagggatgtatgagtggttggtggtggggatgaagtagaggtagtagtggatgtgggtgtttgggatgtgttttttgtggttgatgttgatttttttttgtaggtattttttgtattggttattgatgaattttatgatgggttgttagttgtgtgggggatggggatgagttagtaggtatatgagatgttttttttaagtaggttgtgtatttttaggatttagagtttaatattttattttttaatgaaatgtatgttttgggaggtttggtttgttgagtggagatgttatagttttatttttggttttttaaattagtttttttgggttggttttaggtgatgagttggggatagtaagattttttaggtaattttgttttggtttagaatttttaggtttttgagatgtgtggttttggtagtatgttaggttttaggaggtgggttttgtatttttgtgggttgggaaatttttagggttgattttgggtggggtttagggagttttgaagtttttgttagtgtttttttttttggaggggttttattagtttttgttgttgatgtggtttttgaattttggtgtgttaattattgttagttttatttggatgtttttttttttaatatttgtatagagttatggatgtagagttagaggggagatggaagatttttatagatattttatatttgattgattttggggtaattttaggtaggtagtgatgataattaaggagatattgggaaattaatggttttttttagttaattttggtataggttggtgatggtttttttgggagttttttgtttgttagatttttggtggaaaatttagttgtttgtggggagtttagtgtgatggggtttataggggtttgggatattgatttattatagttagagttttaatatgtttaatatgttggggatggtgggtatagtgagtttttgttttggggatttgggattgtttgatttgggtatttttatattgtattagtgttttaggaaggtatgggtattttatatttttagtttatttttagttattgattgtgtgtgatggttttgatttttaatttttgtgttttaggaaggtaggggtgttttgtatttttagtttatttttggttattgattgtgtgtgatggttttgattttttattttgtgttttaggaaggtagaggagttttgtatttttagtttgtttttggttattgattgtgtgtgatggttttgatttttaatttttgtgttttaggaaggtaggggtgttttgtatttttagtttatttttggttattgattgtgtgtgatggatttgattttgatggttttggggatgtgtttttttgaggtgggttgtattgatttttggttgattttggatttgaagagggtgttgattaaggtggatttatttaagttgttttgttttggggagaggatgggaggttggttaggggtttttttggagagattagtagggtttgtatatggggttttttttatttaggtatgaggttttttagtttgagatttagtagtgtttgggttattttttggtaatatttttgttaagtagtttttgaggattttatttttgagttgggtgtttagtgattgtgtaaatttatatagttgggttttgatgttagtataatttaggttatagtttttttttgagaggtgagttgggtttgggagagttggtattttttgtgttttttgtgttttttggataggaggttttttggtggtttagattttggataggatagaggttgggttggtggaggagtttagggttgtttagggtgtattaggtggttgggatttttgtagtttattagggtggttgtaattaaagtttaggtgtttaaattgtttttttttgattggttagggtttgggtaagttatttgattttattgtgttttagttttttgatttgtaaaatgggataaatagttttttttttgtggagttggtgtgagtattaggtaggtttatgtatgttttatggggtttgtggggttatgtgttagggggtgttggtttgtagggtggtgttatttgagggatagtgattgtgtgtgtagatagttagtttataggtgattgagataaatgaggatgaggaagtagtatttatatgtaatataatatatataatttatatatattttatatatatattttataatatatatattttatatgtataatttataatatatatataatttattttaaatatattttttatatatattttatatataatttttataatatatataaataaattatatataatatgtgtgtgtgtgtgtgtatatatatatatatatatatatatatatatatatttttttagatttggagttttattgttttattttgtatagagttgttttgggttatgttagtaatatattaaaaaaaatattttaggttaggtgtggtggtttatgtttgtagttttagtattttgggaggttgaggtaggaggattgtttgagtttaggagtttaagattagtttgggtaatatagagagattttgtttttatattaaaatgtaaatattggttaggtgtagtggtgagtatttatagttttagttatgtaggaggttgaagtaggagaattgtttaagtttaggagtgtgaggttgtagtgagttaggattattgttattttagagtgatagagattttgttttttaaaaaaataaaaattggttaggtgagatggtttatgtttgtaattttagtattttgggaggttgaggagggtggattatttgaggttaggagtttgagattagtttggttaatatggtgaaattttgtttttattaaaaaatataaaaattagttaggtatggtggtatatgtttgaggtatgagaattatttgaatttaggatgtggaggttgtagtgagttaagattatgttattgtattttagtttgggtaataatgagattttgttttaaaaaaatataatataaaaaatattttaaattatattgatgttttgattttgataatatttttttaggaaaagtgtgggtttttgggaggatagaggttggtgttgggaatttttggtttgaattgtttagtagtttaaggatggatattttttgtttatttttttttgtttattaggtttgtgttttggttaattttaggttaggagttatgttaatgttttagttatgatattttagatttaggagatgttaattgggatattgtaaggtgtatttttttattattgttatttttattattattattattattattattatttttattattattattatttttattagtattattattataatattattattgttattattattattttattatttttgttattattattatttttgttatttttattattattattattgttattataattattagtattagtattattattaattatattattattattattttattattattattattaatattattattatttttattattattattattattattaatattattatttttattaatattattattatttatattattattataattattattattataattattattattattttttttattattattataattattattattattattattattataattattattatttatattattattattatttttattataattattattattatttatattattattattatttatattattataattattattattatttttttattattattattattattattattataattattattattattttttttattattattataattattattattattttttttattattattataattattattattattttttttattattataattattagtattatttttattattattattataattattattattattattattattattattattattataattataattattataattattattatttatattattattattataattattattgttattattattataattattattattatttatattattattattataattattattattatttatattattattattataattattattattattattataattattattattatttatattattattattataattattattattatttatattattattattataattattattattatttttattataattattattattatttttattattattattattattattattataattattattattataattattattattataattattattattattattattattattattattattataattattattattattattattataattattattattattattattattattattattattataattattattattattattattattattattattatttatattattattattattttattattgttattattattattattattatttttattatttttatgattattattattattatttttattattattattattattattataattattattatttatattattattattattttattattattattattattattattattatttttattatttttattagtattattattttattattattattgttattattatttttattatttttattattataattattattattattgttgtaaatttttgaataattataatttgttggggattttgtttggggtttagtttgtttgattttattttatgggatgattttattttatggatgaggaagttaaggtttatagaggaggagtttaggggaagatatataagttttattttgttgagttaggataaagttgggattttttttggggtttgtggatttttaaataggtgtttttttattttgtttgtatttttgtaggtgggtatagttgttatgggagggaggagggaggagagtagagttgttttatgttttgttttttatttggtatttttgggagggagtgattttgtggggaattaggattattgttttttttagggttgaaagggtgaagaggtttagataggtgaagtggttttttgtgtattatttttagagggtaaggttgttatagtggtagttatggaaggtgagggttgttgggttgtttttttttttttttggggttaaagttttggaagaaggtttgtgttatggttgggatgtagaggtttttaggttttttttattttgtttttggttagggagtagggtagtttttttgtagtttatagagatgagttttagtttggttattgtttttgggttttttttttttttttttttttagttatttttttgggaggtagttttgaatttttagggtataagtatgttttttataataggtagaatagggtgggggttgtaggaggggattttatatttttgtttttttttgaagtaggttgttagtttttaggtagttgtgagtatagtagggttatgagtagttgggttttatgaggttataggaagtagagaggatattaagattttaggggagttagggtttagattagtgtagaagaggaaagaaaggtgttgggttggtaggtgtgggtttgtgtttatagagttgggtaggaaggatgtgtatggttggtaaaggttagagaaataggtttggtttgagaggtgtttagatattttgtagaaattttgtaagtttatttttgtttagggtgtgatttggtgggggtatttttttagatttttttttggattttgtggagtgggtagaatatagttttgggagttaaaatggtggttgtggttttttgttttgtgagttaaggaattttggtagttttttttgagttttgtttttgtttggaaaatgggatgttttttttatagggtttttgtgaggtttgaatgggatttggggggttttggaaataataggtggtttattgtagattttagtttggtttttttattttgtttaggttgtgttgattgatgattttttgtggtgatttttagttttttggggttattagggggtgtggaagttatgaggttttaattttagggtagagttgaagttgagttgttgggaagtttttggttggggtgtggtggggtgtggtggggagtttggagggttaggttggagtaatagtgaggggatagttgttatagaattttttgtataagttgatgttattgtttagaggtagtgattatttattaggatttgttttaggttggtttgggttttttaaagttattttaggggttttggatgtgtaggataggtttttttgaggagttgttggaggttgtgggttttttttaggtgtatgtatgtatatgtaatgttattggtaatttgtttttgaggttagggttgttgttttattttatagaagggaagattaagtttaaaggtttgtgggttgttttgggggttgaggttggtttttggtattggttgagtggtatgtaaggtgaggatttattgattattatgatgttgaatttgaagttttgttttatggttttttggtgtatttgttttaggatggagttaatttttatgtagttgaagtttattggggtttttttgttttgtgatgtaggtgtttgtttgagtttggtatttttgggggtgttggttatgttgttaatgtagttgggagttgttttagtggttggggaaggaatagtagaggagttagagtggaataggggtttatatataggtgtttgttaggtggttgttatatttatttttggatggggaaattgaggtattgaggtttagaaaggttaagtgatttgtttaggtgatttttgagaatttttttgggtggatgtttttggttgtggtgttttttaaaaagttgttattttgtagttatgttgtttttttagtaaagttttatttttagatttttaaggttaggtttttttatttttttttttaggagttgtgttaagttgggggttttttgtgttttaaggtagggttgattttgaatttttgtttttgtattttggagggttgtttagataagggtggagggtgttttttttttttggttttttatattgttttgggttatttaggtggatttggtttttttttttatttttatttagataagttgtattgtttgttgttatttaaaggttttagaagttgatttatgagttaagatataggagggatggttttgtaagaaatggggatagaattagtgtgtgtttttgttttttatatttttatggatggttttgtaagaaagggggatagaattagtgttggtttttatggagttgtgtgtttaattttatagaatgagttagtagttttgggagaaggaaaagtgttgggtgtagggtgggtgtttggatgtagagttgtttttgggtttatggaggaggggggtttttgtattatatttgtttttttttggattgatttaggtggttgttttgtgtgtttggttagtgtttatgggttgtatatttataggttaagattaagttttatttttgggtatgtggggtatgtggagttgaattttttgaaattattaaagttttttttgtttgtaggtttttttgatggttttgtttttggttgttgttaagatattatatatgggttagaggtttggggttgggggtggatgtttggaagatgtttgttgaggatttaggtgtttttatatagtggggttttaggggtatttaggatggggttggtttttattagggttggttggtatatgggttaggttttagtatattttagatttgttatatttattggtgtatgtgtatgtaggtgtagataatttgttggttatagaggtggtgtttttgttagtttttataggttggagttgtttttggtggtttttagtttttatgtaggttgggtggttgttgttttgtgtttttgtttttgtttgggtttatttaggttttgttttgtttgtggggagatttttgttttattttgttttttagggaggatttggttttaggtattttgtgttaagatagggattatatggtatgtttttaggtagggttttttttgttagttttttgggaggggagtggtttttttttgggattggtgggtatttagtaggggtagttataggggagtggagttggtgtgggagttagggttatagtatgggaggttgtagggggtttattttttgtgataggtaagtgagtagtttttttagataggaggtagtttttttggtttatgtttattttttattttgtttagaaggtgggaggtaggtttttaggttaggaggggtagtgggagattttagtttaattgtttttttatttgtggggtaagaattgaatttaggaaatgtttattgagttttttggttgtagtttgtatttttagttgatttaagttattttttttggtttattttattggagtggttagagggtgttggagggaggttttttaggtttgaggtattagaggtgagagaggaaaagattttggaagttagaaattgggggttggtttatttttataggtatttttttgtttttttagtttttatagggtataggaatttttattttatggaattgggggaataaaggaataatataattttttgttgggaaatgttaagggggggtttatatatttttattgttgagagtaatatttataggtggatttggaggttagggtttttttttttgtgtttttatgtggtttttatttaggttatgtagtttggaagtttttagggttttgtttttgtttttgttttttttttagaaatatttttttttgggtttttaggatttttaaataaataaagatatagttttgtatttggttatggattatgtggttttggggttgttttttgaagttagatatggggttttgttttgtggggtagtagtttagtttttatttatgtgattgaaaattgtttttatttgtttgtgggtttgagagttattttgtttgggattgggattagtttttatttgtttttatttttttttagtattttttaattttttttagtaggatttggggggaggtgttgttttttgaattttttttttttgtttttaatgtttttggagtttagagtgagggaggggttggtttagttgtagttgggtttttttataggtattagtatttattgtagaaatttaaattaaattaaatattttgtttattaggggttttgtttgagaaataataatataatgtagttgagttttatttttgttattgatgtagggtagtggtttgttttttgtataggtgagagttatttttgtaattttttttttgagaggtggttttgtaggttttggttggtttgtaggtaggtatgtatgtagagagtaatgtaagagtttgttttgtttttttatttggttaggtgagttttggggtttgtttttaggatttttaagtgggaaaagtagagatttttatatttagagatatttttattttggttttaggatattatggtgtttagatagttggaaataatggtaaagattatttattttattgtttgtgattatgatattgtttgaggtttgtgttgtttagtgtggtagttattggttatgtgatttttttttttaattgttataatgtttgttatggttattattttgaagtgtgtagtttagtggtgttaagtatatttgtattgttgtgtaataaatttttagaatttttttattttgtaaaataaattgtttttattaaataattttttagttttattttttaagtttttggtaatttttattttgttgtttttttgaatttgattattttatggatttggtataagtggaattttataggattgtttttttgtgattaaattattttatttagtgtaatatttgaaaggtttatttttgttgttgtaggtattttaattttttttttatggttgagttaaattttttgtatgttttattttttttttttttttttttagatagagttttgtttttgttgtttaggttggagtgtaatggtgtgattttggtttattgaaatttttgtttttttaggtttaagtaatttttttgttttagttttttaagtagttgggattataggtatttgttattatgtttggttaattttgttttagtagagatggggtttttttatgttggttaggttggttttgaatttgtgattttagatgatttatttgttttggttttttaaagtgttgagattataggtgtgagttattatgtttggtttgttttgtttttgatttttttatttatttgattgtgggtatttgggttgtttttatttgttggttattgtgaatagagttgttatgaatgtgggtgtataaatatttttagttttttaagatgttgtgtatttttttgaatttatatttagaagtggaattatgggatgttatggtggttttagtttttgttttttgaggaattgttatagtgtgtttataagtgatttttgagtatttgatattgagttagtttaattgaggaatggaatttttatttttatttaaatttaaatagttatattttataaatggtaattatattggatggtatagaattttagtttaatttattttttattaatggggaaattgaggtttatagagtgatttttttttttgaaatgttattgtaagtggttaggttagtataagatttttattgaatttggtaattttgaaattttatatttttgtttgtatgatatgtggttaatatttgtgattttttttaaagattgtgggttttagtaagatggtagttgttttgttgagatttttattgtatttttaggttttgttttgttatgaatatggttgtgtaaggatttgtttgggtttttgttttttatttttttgggtatttagattaattattagtagtatttatgttgatttttagaaaggttttgatttggatagtaattgatatgttattttatagttaaagtaaaatgtagagttttttttttggttttgtagttgggagttagaggttttaggttttggtttttggtttaaagtgattttttgtaagtttttttagtttggtaaataggttatgtattttttgattttttttttagtttttgttttgtgagtttttgggtgtttgaggttgtggtttatttagtgatatttttagtttttagtgtagtttgtgagtagtataatatatttggttttagaaataattaatatatttgttaatagatgtgtggagaaatttaatgtgttgagttaatatagtggattattttttagttataaaaaggtatgagtgtgtgttaatatagatgaattttgaaaatattttaattgtaagaaattaagtataaaaagttatattttttagggttttagttatatgtttagaataagtatatttgtagggataaagtgtagattggtgatttttaggggttgggggagggggagtgattgtgtattgaggatggtgtttttttttggggtgaggaaaatgttttggaattagaggtgatgtttatagaaggttgtgaaaaaatgttatttaattgtgttttttgaattggtggatggtgtaatatggaaattatatttttatgaggatgggagaggaagggaaagaagggaaggagggagggggaaggaaatagggaaggaaggaaaaaagggaggggaggagggagggatggaagaagggaaagaaggtagttatttttagtggagttggattgaagagtttaatgggtgtagtaaattattatggtatttgtatttttatgtaataaatttgtatgttttgtatatgtattttagaatgtaaagtaaaataaaataaagagtttagtgttttttataagtgtttaggagttagttttatagtttagaggatagttgaggtttagaggttaatatttaggtttgaggtttttaagttggtgttgttagattatgttttagataaatttttttatttttttgtagtaagggtgtttttagggtggtagttaggtggaggtgttaggtggtgggagattttgatagtttttttgtaggtttttattttgaatttaggttttatgttagggtttttttgttatttattggtgttggtggtagtaggttattggttttgtgatggggattgtttttaaatttgtttattttggggattagtttttttttttttgtaggtgtttattgggttattttttttttagagttgtaggtgggtttaaggtagggatgaaagggttgtaatttatgtagttttgagttagtattttttgggaatatttgtatttagtgataaatttttattttaattttaggatttgttgaggatgagggaattagattgttgtttgtggttgggatgggggttgtaggatatttggttgggaggtagtgtttagagaggaggtagttattggatatgatatattttaggggtatttatatttattatagttttagggttgattttggtttatttggtttggtgttgagagagggtttgatatagtaggtttgtaaagtttgatttggaaattaagatttaggggttgtttttttttgtttatttttttttgtgtgttatgttgtttggtttatgttttagaaatgtttatataagttttattagttttgttggttaaatgtagagatggtgttgttggggtaagggattttgagttattgtttaatgttatttttagttttaggggagtgatagttgggtttgtattttaggataaagtgtttagggttaagttaatgttatttttttgttttttttaaatttaatttatatttggtttttagagtatggattgaaatggttatatttttatatattttgtttgttattgttaatggtggttaagtagaatgtaaggttattttttttttgtttatggaggtttgtgaagttattgattaggttatggtaggggagttggtggtatttattatattttgttagttttttaggtttgtgtttaggagaaagttgttggtatttatagttggtgtttttgttttggtgaagatttttttgtttttatttattttggtttagtgtgggtttagtagtttttttattttgttttgtaataatgtatattggagtagtttttagttgttttttttttgtaggtttttttgaatttagattttggggttagtatttttgtggtagttttatggttatttgtaggtttttttagaaatttgagtttatgggggtattttaggttttataaattaatagatgttttttgttttttataaaggggttttttaaagttgagtgagtttttgatgtaggtaatgttaggaggatagtgtttggttagggttgtttttttttttttttttatttttttgggtgtttgtaaagttttttagatttttgttgaattttggggaagttttgttttgtaattagggtttgttttttttgtttttatatagagtttgttttttgtgtttagatagtttttttatgatggtaattgaataatgatgtgtgtggtttttttttattataatttttttatatagggtttgtgaagttagatattttatttattatgtttattttagtttggttttttttagagtagtgtagggtttatggtaagttttggtaaaaagtttggtgaatgaatgaataaatgaagaaataaagtttattatagtagttgaggtttattgggggttttttgtgttaggtgttattttaatttttttttttagagagtgggttttattaatgttggttaggttggttttaaatttttggttttaagtgatttttttattttggttttttaaagtgttgggattatagatataagttattgtattgagttttaggtgttattttaaatgttgtttaggagttattataattgatggattattatataattttataaggtagttattgttattgttttattttatagataaggaaattgagattgagagggtttttgttaattatgagggttgtaaagtgagtaagtggtagagttaggatttgaagttaggtaggtgagttttaggttgttgattttttttttaggttaggtttttgggaattatggaaaggttggagaagtatggggtttttgtagttaggatttagaaggtgtagttgtggtgtaggtagtttagtattgaggttttggtttttagttttttttttagttgtttttttttagggagttggaggtagagttttgaattgttaggagaagattttatttgttagttagggaaagttgttagggttttttttagggtttagagttattttaggtttattaaagtatattagtattttagtttttataattttttttgtaagaaagatgatggtattagttattgggttgggttgggggttttagattttaggggtttttttaggtttgtttatggtttttttaggatatagatgtttatttgagaaattttagtgtattaggggttttatagttaaaataaagaggtagagttgttttggggtttttgttaaagtttttaggtagatttatttagtagatattaaaatgtttattttttatttgaaaattttatttttaggaggttgttttaggttgggttgataaaatttatagagattttaatgatgattttttattttaggtatgagtgagtgggtggagggagaagttattgttaattattaatagtttaggaaatgtaggtaaaggaaagagaatggtaaggtgatagggttggaaattagatatatgtgtagaggtgagtagattttagagaaagaattgttttggaataagatggtaaagaaattatagataataatggtagatgatgattttggggttttagtggattaggattataatattgatttatttgataagtatttattgagtgtttattttatagtaataaaaagatgatattataggtttgagagtagttagaatgaaaatagtggtggtatatgggaatttgaagtttatttatttaaatgtttattagttgagatttttggatagatttgaagtagtttttaatatgtaaggaatttataatttgatatagtagtataggatatgtgtgtgttataaatttttggtgaaaagtaaagattttttttagaaaagtatatattgaagatagatagatagatatatatgtattttgaatggtttattaaagaatttttaggtttgtggattttagttaaaaaaataatttggtattttgggaggttgaggtgggaggattgtttgagtttaggagtttaagattagtttgggtaatgtagtgagattttatttttataaaatgaaataaaataaaatgagaattaaaaaaaataaataaatttggtgtgatgagaatttatagaatttaatagggttattttagtattatttgtagtattttttaaatttttgattatatatataaagttttgggttttatagttagagaagagggagagtaggttaaaaataattatttaaggtggaagatgagtttgagaaataaagaggtaagaggagaagattgaggttagttgttttttatttttgagttttggtaggaggaagtttttaagtgagaataagttgttgtttgtggagtggattttagagtgggtggatagagatgataaggaatgttatttttggggggttttgaaaataggatatttttttattttaattttgttttttattgtattgtgtttttattgatttatttaagttattataaatattttataaatgttattggggattttttgtttttttttaaagatggaaatattgaatataaatgattaaattgtgtaaatgtgtgtgggtgggggattaaggattgaatttttaaaatgtatatagtttatttaatttgttaattaattttaaattaaattatattttatattttgtatgggataggaagtgtttttttaaagtttggttaggatttgggatgttggaaatttgagattttgttttttttttttgagatattttgaaattttgtttagaaattgagtataatggttttggttttttagagaaagatatggatttgtaaaggtaaagagttgtatttttttttgagttggagttttttttggtttttattatggggtttaaataaaattgtagttttatagtttttttgttggtgtttttttttttttggtgattaataaggtggaagagttaataagaattttgtgtgtttttttgtaggatttggaagggataggtggtgtgagtttgtttttatttagtttttttttttatttatttaggggttgaggtgtttttgaggtagggggtgggggtttttatttttattgttggttaaggtttttttagttttttttttgttaaatttttttaagtaaattttttttttattgtggaggaaggaattttaagtagttttgtttttttgttagtatggttttaattggttttagttggtaaagttaaatttggataaggtttaagggttttttatattatttgttgttttttggaagaggtttttttttgtttttttatttgtaatttattatttttttagtttgagtttttttatttaggttttgtggtttattgagatattaattttgggttagagtaagttttgatttgtaaattattattatttattttttaaagagttatttttagaatttaggttgtagggagggtaggttaaggatgaattttttgatttttggtgtggtgtgtggtggggggggttattttatattttgttttttgttgtttttttgttttgttttaggttttgaagtggatttattgtagagggagggttagggaatggttttgatgttttttttattttaaggaattttttagtaggagtggtttttattttaaagtaattttaagatttagtttgtgttagttttttagttatgtttatagtggtttgttaattagagatttttttagtttttggtaaatttgtaaatttataaagagaaagaaaagtttttttgtgggtgggtggatattggttatttgttataggttggaatttttttttattagggatgttttttaagtaggggttggggagggtagggtttagagtttttttttttttagttttttttgttattagtagatttgttagtagatatatagtagagtttagtagtgaggtaataataggggttgtgggggttggggttttgttttttttaatttatgaaattatttgaaataataaaatttagataagggtttttggggtgtaatagggtggttttttgttaggtgttgggtagaaaaaaagtttttttttaatttttttttgttgtgtagattagtttgggttttggggatgttgtagaggttgttttatgtttaggttttttagagatagtagggggttggaggtatggtttgtttgggggtaggggataggtagggaggggtatatttttgggttatgagtaggagtttgattaaatgatttttttaggagggagaaagatattgtatataattgtttgattatagttagaggggttggaaaggtgggggaaaggggtgaaggggttaattgttttaggtgtttttaatttatgtagtatttatttggattgataagagttgagagattggaattgttttttttttttgtttttaggttttgttttaggagtttttttgtttaggagtttgggagttgaggaggtttggaagtagtgggtttatagtgttattgttttgggaatttatagtgttttggatgtggtttttttggttttagttttgtaggtagtttatttggattgtatttattttttagaagagttgtttagaattttgtatgtttgaaagaaagattaattaaagaagtgaggaagttaaagagaggtttatgaaagtttatgatgtattttttaagtgtatattttagtaattttaaatgttttttgaagtaaggatggggatggatggttggataaatggatgggtgtatgggtgtgtgaatgggtgagtgggtgggtggatggatggatagatggatgaatggatgggtaggtggatgaataggtaggtgaatggatgggttggtggatgaatgagtaaatggatgaatgattggatggatgggtggatgagtagataggtggatgagtgaattggtggatgagtggatagatggatgagtggatgagtagatgagtgaatgggtggatgagtggatgggtgggtgagtggatgagtagataagtggatgggtggatgagtggatgggtagatggatgggtgagtggatgtgtggatgagtggatggatggatgagtggatggatggataagtggatgggtagatgagtggatggatagatgagaggatgggtagatggatgggtgagtggatgggtgggtgagtagatgggtggataagtggatggatagatgagtggatgggtggatgagtggatggatatatgggtggatagatgggtgagtggatggatgatgagtggatgggtggatgagtggatggttgagtggatggataaatgggtgaatgagtggatgggtagatgagtggatggatagatgagtgaatgagtggatgggtggatgagtggatggatagatgggtgaatgagtggatgggtggatgagtgaatgagtgaatgagtggataggtggatgagtggatgggtggatgagtgtatagatagatgggtggatgggtggatgagtggatgggtgggtgagtggatgggtaggtggatgagtggatggatagatgggtaaatgagtggatgggtggatgagtgaatgattgtagataggtggatgagtggatgggtgaatgagtggatagatgggttgataggtggatgagtggatgggtggatgggtgggtgtgtggatgggtgagtgagtggatgggtgggtgggtggtaagatgggtggataggtatatggagtttatttaaggagttttagaaatatatatatatttttttattttagattttttttaggaaaaagtagtgtgtatggattgttatttggttatattttgagatagttatttttattttttttggaatattgtttggggggatgtagtatagggtatttaagtaatttttgagtttagggtagagatattaggaagtagtaggtaggttgtgattttgtaggtttgttttatggtttttgttgtttgtattatggtatgaagtttagatgtatttttggatttggggttttgattagatggagttattaattttttgaagaatgaaatatataggggttatttttgttttttagttgtagggaatgatgattatttagttttttttttttttaaattttttttaggtttttgtgtatggttttgttgattttttttttgtttttggttatttttttagtttttgttgtttttttttttgtttttatttatggagttagttttggtgttttgagagtttttttttttagttgattttatttagtttttgagtatttaatgttaataatgttattttttttgtttagatttatatttgagtgttagtttgatttatagatgtgtttttgggttttgttgtgttaggttttttgttgggttttgggtatttgtagttattgttattgttaagttttaatatttgaaggtattttgaatttaatgattgtgttttaggttgaattttggagtttttattttatttgttttttattttattttttatttaagtgaatagtttttttagttaatagttattgtagttagatttttaggggttgggtttgggttttttatttttattattttgaatttatttatttattttaaatttttattaatgttaatttaatatattttatagttattattattagttgtttttgtttgaattttttttttttaaagtattagggggtgtgtgtaaaatttattaatttgatgatttttttttatgaagttgtgattggtttttattgtatttgggatatattagatttttgtggttttagaattttgtttattattgatgtgttgtgtgattttgagtaagtaatttaattattttgtgttttaatgtttttatatgtgaaatgggataataatatttgttttataagaatgttggggattaaatgagatatttatttatgaagtatatagtgttgtgtttggttagtaaatgtttgaagtttttgttaataaaatatatgtttttaatttattttttagtttttatttatgtatagtttttttggttgttttttagtttttttaataaggttatttatagaggttttttttgttgggattattttttttttatgttgtttttagaatttttatttgtttttttgggatagtttatttatattgggttttttagtttttgttttgttttgttttgttttgttttttttgagatggagttttattttgttgtttaggttggagtgtagtggtattatttgggtttattgtaagttttgttttttgggtttatgttatttttttgttttagttttttgagtagttgggattataggtgtttgttattatgtttggttaattttttatatttttagtagaaatggggttttattgtgttagttaggatggttttgattttttgattttgtaatttgtttgtttttgttttttaaagtgttgagattataggtttgagatattatgtttagtttaggttttttagtttttatatatgtggttttttgattgttgtttggggtttgttgtatttattatttataaaattttatatgtttgaagtatttagtaagatgttgtgaatgagtgaatgaataaatgaatgaatggttagtttgttgtttttttgtttggttttttgttttttttagattagtatgggggtagttatggtttttgtttattttggtaatattgttttttttgtgttggttgtgttggttagagtttttttttatggtgtttttgtggttttggtgtgtggttgtttgtgaatgagatttatgatttttggtttttattatttttttggagttataaagtattaaggtggaaggatggatgggttttttgggatagttggggtgggaggttggtttaggaaattttttttaggaaatggttagtgtgggatgaggtgtttggtgggaggggagtggagtggggatttggggtttggttgttttgtagttagggattttaatttttatttttttttttgtttattttttaattttagtgttgggtttagggtttttggggttttttttaggaatatagaagatatagtaaggattagggatataggataggtagagtttatgggtaggaggtttttagttagtatatttgagtttatgtttggttttaattagatattgagattttggttaggttattttttatgttgaggtaggggggttttttagaggttattggtttttaagtattgtgtggaagatatgttatggagagttagtattttttgagatattagtagaaggttagatgttttgtggtttaaggatgatttggttttagtgtttatttatttgttgttttgtatgaaaagtttgatgtgatatggttggttttagtggaagagtgatttgggaattggtagagtggatttagtaattggtaaattggatttagtaattgagatattgttaggggtttggtagaagttttttaatgtattagatttagttttgatttttatagagtttagttgagtattaaaaggtgtagaggttgagttgagtattaggggaatattgattttagggttgattggtgttgtgtgtgtattttatagtttatagatggtttatatttatttgattgtatttgatttttttttgtgaggttttttttagattttttgttttttaaagttattagttgtgttttttgaaattagagtaaagtaataaaattgtagtaatagtgtgtttttatgaatgttgtgatgttagttggttaaatgagggagtttttagggttttttatattgttttgattttgtgtgttttttggttttggtttattttttatattttttgtttttttttttttttttttttttgaggatttagggtttggggttgatttattgtgggattttaatggtgattttttggaagaaatgtttgttttttttttttatttagtagtgatttttggtttgtttatgtttatgtagttaatataggtagtagttggaatttggaagtttttggggtgggagtttgtttttttttaggtttttttagtttgaattttgggaaggagttatatttatatggtaattttttttaaggttgggagggggaaggggtttggtttgggtttgattatttttttgaggttgtgtttattgggttttttaagttagttgggttttttggttgtatttttgagggatggtaatagattatagtgtaaattgtttattggttggttgggtagtgggtgtttagatgtgggttagggtttttgttttataggttgtgtggtggtttaaagtgggtatttttatgggtatatatttgtgttatagtttatttgtgtgtgtgtgtgtgtgtgtgtgtgtgtgtgtgtgtgtgtgtgtgtgtgtgtgatagtttagaaatatggtaatttatagtttttttaagatgttggttttgggagatttgtttatttgggggttttagtatttttagttttttttaggaaggttttgttttttttggtttgaagttggttttagggaagaatttttttagaaaaataaaagttattttttttagttttagtttagtttttttttaggggtgagttatattaaatttattttttttttttttttttatttttttttttatgttgtaattagttgtaagtggtttatttatttaggtttgttagtttattatagaaaagatatttgaattttgtattttttttttttgatttgttttgggttttaataggtaaaggaaattggaagttagtagttaggatttagttgtaggtttttggggttattttgtgtttttattttagttttatttatttttgtgttgatttaatgtttatttattttagtttatggagtgaggtttggatttaagataaaataaagggggttttggttttttggggtttatagtgtttggtgttggtgagataattttagagtatagtatagagaaatggttgtgatatggatttgtagtatttggttggttaagtatagtaatgtatttttattaggtttgggttttttagtagatatatggtttaaaggttggttggttaaattatatgattttgtaattatttaagagaaatgaaaatatgtttatataaaaatttgtagattagtatttattgtagaattttttataatagaattatgttaaaaagtagaaataatttaaatgtttattagtagatgaagagatatatagtgtggtttatttatgatggaatattatttggttatgaaaaagaatgaagtattagtatttgttataatgtggatgagttttgaaaatattttattaagtgaaaggagttagatattaaggttatatattgtatgattttatttatataaattatttagaataggtgaatttatagagatgaaggtagatgagtggtggttaggggttgagagtttggagttgggaatggggattggttaatgggggtagggttttttttggggatgatgaaatgtgttgggattaatggtgatggttgtgtaattgtgatggttaattttttgtgttagttgggtgtagtggtttatgtttgtaattttagtattttgggaggttgaggtgggtggattatgaggttaggagattgagattatggtgaaattttatttttattaaaaatataaaaaaaaaaattagttgggtgtggtggtgggtatttgtagttttagttatttgggaggttgaggtaggagaatggtgtgaatttgggaggtgaagtttgtagtgagttaagattgtgttattgtattttagtttgggtgatagagtgagattttgttttaaaaaaaaaaaaaaaaatttttgtgttaattggattgggttatggggtatttaggtaattggttaaatattattttgagtgtgtttgtgaaggtgtttttggatgagtttaatatttaatttttttattttttagaaagtttagtttattgttagtatttatttaattttatataaatatgttttttgaggttgaagtaaatttgattggatgttttgtgtgaaaattaaatataaaaattggttaggtgtggtggtttatgtttgtaattttagtgttttgggaagttgatatgggttaattatttgaggttaggggtttgagattagtttggttaatttggtgaaatattgtttttattaaaaatataaaaaattagttatgtgtggtggtaggtattttgtaattttagttaaatttaggaggttaagattggagaattatttgaatttaggaggtagaggttgtagtaagttgagattgtgttattgtattttagtttgggtaatagagagagtttgttttaaaaaataaaaaaattaaaaagaaaaaaaattttttaaattgtttttgtagttatttttaagtaaaataatagagttatttgagttgtttattttggaaaaattagatttattaaatgaatttttagttaataattgattaagaataatgttaatattatttgtaggaatgttgtgttttttaggatttgatatttttagtgattgagaattattatttttttttaaattttatttatttatttattttttgagatggaattttgttttgttgtttaggttggaatgtaatggtgtgattttggtttattgtaatttttgttttttgggtttaagtaattttttggttttggttttttaagtagttgggattataggtgtttattattatgtttggttaatttttgtatttttagtagagatgggattttattatgttggttaggttggtttttaatttttggttttaggtgattagtttgttttagtttttttaagtgttaggattataggtatgagttattatatttagttgagaattattatttttttttaaaggaaatattattattaaaaatggaatgttataaatagaatgatgttttttgtttttaaagttgatatattagagtgatgtgaaaataataataaaagtaagatattttttggtaaatttattttggggtgaatgttgtagttataagtattgttggtgagtatttttggggtaaataggaaaagggtgtaattaggagtttgggtaaagtagattgtgtgttttgatgggggtgggttttatttgattagttgaaggtaatagggtttggaatgtatattttaagatatagtgttttggtatagtaaatatttttagttgaaggaatttaagaaatggtaggtttaagaagaatttattgatttgttttttttttgaagtagattataagttttttatgtaagaggtgttttttttatatttagtggaaaggaatagttttatttttagagatagaggatttgagaggggttttagtatataggttttgttgagatttttatgggtttattgtttagtttattttttgttgttttgttatagttttttatgattttttattttttattaaatttagtataaaaatgtttaggtttaggttaggtatagtagtttatatttataattttagtattttggaaggttaaggtggttagattatttgaggttaggagttgaagaatagtttggttaatatggtaaaattttatttttattaaaaatataaaaattagttgggtgtggtggtatatgtttgtagttgtagttatttgggaggttgaggtatgagaatggtttgaatttaggagatagaggttgtagtgagtagagattatgttattgtattttagtttgggtaaaagataagtaaaagaaataaataaaaaaattgtttaaaataagtaataaataaatttaaaaaataagtaaaataaataaaaattgtttaggtttaggttgggtatagtggtttatatttgtaattttagtattttgggaggttaaggtaggaggattgtttgagtttaggagtttgagattagtttgggtaatatagtgggattttgtttttataaaaaataaaaaattagttaggtggggtggtatatgtttgtagttttagttatttgggagtttgagttgggatttaagagtgggtttagagtagtttttggggttggtagttgggttttagtttgagtttaggaagttaaggttgtagtgagttgtgattgggttattgttttttagtttggatgtgtgatagagtgagattttgttttaaaataaaataaaaattgtttaggttaatggtttttttgggtttttatttttttatgaaggtttggtgttaagtaaaatttatttgaattgttatgtttgttttttgttaatttttgttagtttaatttttagggttttagttaatgaatttaaaattgatagaaggaaagggtttttttttagattttgttttgattaggtttttgtaattttgtgataaaggtttgaaggtttgaataggaggatataaggtttgagtgagagagaattttttttgtttaattgtttttaatttggaatattagattttttttgttttagatttaaattgatatatgtgttttttttgggttttgggattggaatgatgttattggtttttttgggttttgggtttttaggtggatattagagttgtaatatgggtttttttgtgtttttagtttgttgatttattttgttaattttggtatttgttaatttttgtaatgaggtgagttaattttttataataataaatttttttatttaaatatatgtatatattttttattggttttgtttttttggatgattttaatataattattttgtgaatatagtaaaattattgaattgtagattttaaaaaggttaatgttatagtatgtgaattttatttttataaagttattatttaaatagtaataagaagttggtgagttttgtgtatttttttgtaaataagagtagggatagtgttgtttttgtttttggatgtttttagtttttagtttgagtttaggaatattttttatgtgtttttttttttaattttgtagtttaagggtgggggtggtttttagtttggtattttttttgtagttttttattttttttttatattagttaatggatatagaggtttttttatggatttttatttttatttatttatttttatttttttgagatagagttttattttgttgtttaggttggagtgtagtggtgtgattttggtttattgtaatttttgttttttggatttgagtgatttttttgttttagttttttgagtaattgggattataggtatgtgttattatatttagttaattttttgtatttttattagaggtagggtttttttatgttggttaggttggttttgaatttttgattttaggtgatttatttgttttagttttttaaagtgttgggattagaggtgtgagttattaagtttagtttttttatagatttttaaaagggttttgggtaatatagattgggatttgttaagttattaaatgatttttttaaataaagaaggaagttataaatttttatttaaaaggagtgggggatggtaatagaaatatagttagttagaagttggaagggttttatttaatttatttttaaggtttttgggtagaagggataagggaaaatttgttttttaaatattttatttggtattttattttttggatgtaagatgtagttgtgtatagtggtagtagtgaggattttggtttggtaggtttttatattttttgttgagggttttaggggttagggttgtttaataggattaagaggaaatgattataggagtttttagttgttgggggtggtttttgtggttttttgggttatttttggtgaatttattttaaatttggaagaggtttaagtttttttgttttttgtattttaaattttagttatgttagttaggagttttgggggatgagaaaaaatttaattaagttttattgtgttgggtgatataggatttagaaggagaggggtttttggattgtttaagtttaatgataattttagtagttgggtttttaagttaattagtttttttttttttagtagtttttggggagtattatggtgagttgtgaggagttagtttagtatggtatatataatgtaggggtttttttgtatttttattttataaatattagggttttttgggggattagttttttatttttgagttattttttttttattgtttttttaataaggaatagagaaggagtttttattgtttaattagatgtagaaattgatgtatgtatagagaggttatgtgtgatatggtttggatgttgttttttttaaattttatgttgaaatgtgatttttgatgttggaggtaaggtttggggggggtggggtttgggttatgggggtggattttttatggatggtttggtgttttttttatggttataaagtttgggagatttgattgttatagagtttgggagggttgggtgaggtggtttatatttgtaattttagtattttgggaggttaaggtgggtggattataaggttaggagtttgggattagtttgattaatatggtgaaattttatttttagtaaaaatataaaaaaattagttgggtgtggtggtatgtgtttgtaattttagttatttaggaggttgaggttgtagtgagttgaggattgtgttattgtattttagtttggttgatatagtgagattttattttaaaaaaaaaaagagtttgggagtttttttttttgttatgtgatgtgttagttttttttttattttttattatgaggaaaagttttttggggtttttttagaagttaagtagatgttggtattatttgtatagtttgtagaattgtgagttaaataattttttagttttggttattttttatagtaatttaaaatggatgaatataatgtattagtttttttttttggattttatagtgtgtttggttggggttgtgttttggggaaatggtaattgtgaggtttttatagattgggtttgggttttaattatagttgtattttagtgttttgatattgttgagtggatgtttaaaaagtattgttgggtgaatgtgtgagtgaatgatgaagatggaggtggttgttggtgttagggtaaggttttaggagtttggggaggtggtattaggtagtttaggttaatggttaattttggatagggttaggaggtagttagaatggttaaggatagttaagggattttaggtaagtggttttattttttttaggtgggtaggaagtaggaattagattaaggggtgttaggtggtagtggtatttagggggtttgaggagtaggtgtaggtttagtagggttggtggtgttatgtgtggggttgattgtggttttgtttattgtttttattttttggatgtatgggtttatggtttttaaggtttttttttgtttttatgtttatttttttaggttttatttttagatgttaagttatttttttatttttattttttttgttgtttttatatttgagttgattttttttttgagttttggtgaaattttagagagtttagaggtgtagtttatatttttgtgttataaggtttttgtagtttttatttttttgggatattttattttagagttgggtgtgtatttattttattggattagaaattttaggaatgtttattttgtatgtttttgttttttattttttgtttgttatttagtttgtggttgttatgtggttgggttttggtagttattgtagttggtaatatataattagtatttttgtgtttaggttttgtgttgagtttttttagttttatttttgtttgtttttaaaatggtttttgatatggtaattattattatttattttttagataaaagattatagttttaggagaggaggaatggtaggtttgaggttatgtggtttgtaataggtaaatggatttggtagttattttatttttgagtggggtttttttttgtttgtagattttgttgaggttttagagtttggagttagtgagtttttattgagtataaggatagtggtggtgttggggttggaataaggtagggaggggttttttaaattatagttttggttgtggatttattttgggattttgttttggttgggaattttgttttagtttatttgggatatttttttattttgagttttgtattgggttgtgtatggggtttgttgaatgagtgagggtaggagggatggtgagtagggtggaaagtgattatggtgggtaggtttttgttggaagtttgaaatatttttggtgagtaggaaaatattaggggaagaggttatagtttttagaagggtttgttggggattgttttgtagtttttttattgggataggtagaaaatttagtttttttttagggtgagtttaggaagtttgtgggggtataggttttagttagggtggtgtgtgggtttatttaggggatgttgttgtggtttagagttaggttaaattttatgtattttgtaaataattatttataataaataaggtttatttattttttaagaagagtaaaatattataggaggtatttttttattaattaaatatgttatagtgattttattgtgttattgagggagggtattagggtgtttggtttagagtaaattgtggttagggggatgggtatattgttaaattggttagatttttatttttgaaaatgtgggttaaattttttttaataagttataaggaaatttagtgtgaattttatgtttttattattattggttgttttggaagattgggaggaggggttttgttttttttttatttttggttatagggtttgaggttataatttggattgggattttaattttttttttggggaagaggtttatttagggtgtttgttaaggtttagtgtataaatatggaatttgtttaatgtttgttttggtatttttgggttttttatattgggtttttttatttgattttttaagtagtgagagtgatgggatatggggtgtttttaggggagatttggggagatggagtaagttttttagtttaaggtgaggttttgaggtatggtttatgtagtgatgttttttatgggaggtttgaggtatgattaggagtttggagatttagtagaggtttgggtatgggatttttggtatgtagttagagtgagggttgaggttgtatggatgtaagtaggtgattttgtgttattgggtgttatttgtgttgggttttgtgtagttgtttttattttattgagttttagggaggtgaggtaattattttaggtatatagttttgggggtaaaggttggatttaggtgtgtttgattttagaatttaagaagataagtagaggagtttgagttttttgagattgtagtgatggtttagtgttttaggatggttaggttggtttttgtagttttagttaattgtgtttttttttagttatttagggttttagtgttggtttttgagatttggtattggttataggggtttatttttggttgtggatatttagtgttggttattgggatttggtattggttgtggggatttgtttttggttgtggggatttagtgttggtttttgagatttggtattggttatggggatttgtttttggttgtgggtatttggtgttggtttttgagatttggtattggttatgggggtttgtttttggttgtgggtatttggtgttggtttttgagatttggtattggttatggaggtttgtttttggttgtgggtatttggtgttggtttttgagatttggtattggttgtgggggtttatttttggttgtagggatttagtattgtttatggggtttgtttttggttttggggagttagtagtgtttgtggggtttatatttggtggtggggatttggtgttggaggattttgatagtaaaattatagaggtgataggtaatagtaatttattagtatagtgtgtggtttgttttagttatggtatttttttttattttgtgtttttttattataaagtttagtgtaggtaatgaagttaagaggtggagaatttgtaggaggatgtatattatatttgttttttgtgtggtgtttttgtattttgggtggttgagattttttgttttttttttaggtttttttgtgttaggtttgtgttgttttttttggttttggtttttatttatttggttttttagttatagatagtagtgatttttttttttatttaatggggttattgtttagtttattattagtttttagggttggtagatgatattggttatgggtagtgttttttttggttttagtatataaggtataaaagatattattttgttttaagatttttttagttatgtggtgtatgggaagtggtgttgggaattttttagggtagttttttgttttgggggagattgtgtttaaatttttgaggaaatgttgttttttggttttttttttgaaaaattttttaaggagattttgtgtggagtgtgtagggagaatggagatttttgtgagattgttttgggatagttttatagaaattataaattatttggataaaagttgaaaatttgtggttatataatgttgattatttatttaaatatttgttgagtaagtatttatgatgtttgggaatttaggatgtggattgataagatataatttttatgtttgttttagtgatagagagagagatggtattattaattttgtttgttgggggtttttttggagggggtgtgtaggtttagggttgaatttgtttagtggatgtgttatttatgtttgtgtattttttggttttgtggtggtttttggaataaaggttgagagataaaagataaggatttgggggagggaggatgtttatgtatattttattggggatattagtaaggatgattgtttagtgattatttagtgattgagttatttggtgtttggagtttggtatttatagagtagggtgggggtagtaggttttgttgggggtataggtttgagaagggagtgttgttagttaggtttgatgggatagagagtgaagggttttttttttgaaggttatgtagaggttggaggttaatgttagtaattttattaatgttagttttttgagattgatttagagttggggttttaagagtagttttgggtgtttaggagttaagattttatagagggtgttttttatttttagtttagggaaagtgataaatttggagtgtttttgtttatggtttaattattgaatttaaatgaatgtattgataaattgtatttagtgttatttatagggaaaagggagggaaaaaaaaaaaagaaagagagttaattgtgtttaggttggttggttagggggaggatagatgggttattatttttgttattttttaggttttttgtattgattttttatttttagtaaaattaaggtttagtttttttttgtagttttggagttggttgggatgaagtaatttttgtaggtagattattaggtttattgtgatggttttagtagggaatttagtttaggttatagtagtttaggtgtttgtagaaggtttagatttttgggtgttaagttttttttttttgtatttgttttggggtttggtggggtgggtagtgtgtgatttttagggttgatgaaagagaggaggaagaggttgagtggtggtgagtttgaatagttaattttgggaggggttgaggtggggaaggtttttattgttgttttataggttttggagtaaggtttttatgattttattagtagttgggtaggtataggtttaggtgttgagtgtgttaggatttttgttgttttttgggtgggggtgagagggatttttatgggtttgtaattagatttgtgtttttttagttaattttttattaaataaatttatatgtatagtggattgggtatggttgttatttttgggagtttttttgggaaagttttttaaggttttgttgagttttgggaataggtttttatttgtttgggaattgggttggtatttaataaataaattaaagtttggtgttggaaggtagaattttgggattagagttttagttaagggttataagttttttaggaagttttttttttaaagagtggttgtgggatgttgggagtttttagggtggttagtttttaggtttttttaaagtttaggtggtattgatgttttgtgttaaggtgagggttgtagagaggggttggtggggaggagtttttatagtttattttggttattgattttatttttaagtattgaaataaagttttttttttatatttttggttagggagagagggtggaagttttaaatatttggggtgtatgggaaaggtttatatgtatagaagaattagataatggaagttgttggtggtggtgataggttttttaaaggggttttgagatttttgatattggtagggaagttatatattgtattaggtttgggggtagggagaaggggtttttaaggatggggttgtttttttttgtggaagtgttttgtattgtttgataagagtagtttggattagttgtggtataataggaagttgggagaatatggtggtttaggaggttggttagggttggggagtggttaatttagagattttggttgtttaagtgggtttagggtttttggggtgaaagtttttgtggagtatagtggatttagtgtttggaggatagattttaggtttagataaggttttttttttttttttttgagatagagttttatttttgttgtttagattggagtgtagtagtataattttagtttattgtaatttttattttttaggtttaagtgatttttttgttttagttttttgagtagttgttattataggtatgtgttattatgtttggattagttagtatttttagtagagatagggttttattatgttggttaggttggttttgaatttttgattttaggtgatttgtttgttttggttttttgaagtgttgggattataggtatgagttattgtgtttggttaataaggttatttttgatatggaatgttggtttgattatagtgtttgatggtttttgtttgtaattatgtttttgttttttattaaagtagggtttttagggtagaagttgtatttttttattttagagtgttttatgttattttttaggtgtatatagtgggttttttttattgtagttgaattggttttattattattataatgatagtttataggggtgggggttagtgggaatataaagtggttaatgtaatagtgttttagttattttgatatagaaatggttaggggatagaaggggtaagttgggagttagtagtaatttaggtttttagagatgagtattaaaaaaggtgagttatattataggttttttttgattatattttagtttaaaagagatttaaggagaaataagaattttatttttttaataaggatttgtatattagatgttaagtaaatattttttttttttttttgaaaaggagtttttggggttgttgggggagttggttaaagagaatgatatttatggaaatatatgtggttttattaagttttaaggtaaggtggtaatgaatggaggaggaaaatttatagtattattagggaatggggtttttttttgttttttttttttttaatgggtttttttatgtgggatttaaattaaattttaattttattttgatttagtaggtgttgtttttatagttttgaatagatttgttagaaaattattgtttaatttgtttttgggtggtatatttttttttaggaaaggaattataaatttattttagatgagtagagagttgttttttaaatttttgattaaaatatagtagattttatatgaaaaagtaaagagagaggggttagggatgaagtgtagtaggttggaggttgagttagtttttagagttattgggatggtgttttaggagtagatggtattgtttataaagttttttgtttttttttgttttgaggttggggattattttgttggttgtatgatttagtttttggggtttttttagtatgaaaagattttttgaaagtaggtttgttagggagattttttagtttttgtttattgatatgtttttgtatggttgatatgtagtatgttattgtagagaagtaaagtatatgtagattagttttgttagtagtattttttttttttgttttttttaggaatgttttgtatatatttaatatatttaggaatttagagttgtgttgtagtagtagttttttggattttagtgttggtgttgtggggagttttggttatggtattttgagtattgagattatttttagtttttagttagttggtttttgggagtttagaggggtgataatttgagtggagtgattttagagaaagtggtggttaatttgaatttttttttggtttttttggaagttagggaaattttttgtgaaaaggaaatatgttttaagaagttttgggtagtaggagaatttagttatttagtttagttggttaaatatttataaagagatagttgtgattatataaagttttatttttttattttgaggttgaaaatttggtttttgtgtggagattgagttttttgttattttttttttggggattttgtttggttttgttggttttgggttggggtttagggatagtgtggtttttggtattgttattatggttattagggtttgttttgtggttgtgttatttgagagtttttgagttagtggtgtaaggttgggaagaataaaggagtaggatttattttagtagtggaatgttgggttgtgttggatgtgttgagagttgtggtttgtttattgggttatatggtttagagttgagtagaggattaaaggggttttgtggttgtggaataaggagttttttagagtgtggggtagaggtagggagggattttgattgtttgggaagggaggtttggtggggaattgttttaagggggtagggtgaggggagtaggaggagggggtaggtagagataggggtgtttagtggtaggtttggtgtagaagtaatttgaaggtatgggagggatgttaaggagttgttatatgttaaaggaaagtgatagggtttttgggaagagtgagggggagttgttaggaagaagagaggggaagaggtttttagggatttttggttatgttgtttttgtttttgtttttgtgtttgttagaggtggtgtttgtgaggagttttttttttttagttaggttttgaaattgatttggatattttttttttttgtgttttgtttgatatttttgttttttaggtgtttttttatttatttgtttagatattgttatagttgggtttttagggagtatggttagttattttagaaagttatttagatttgtagttagggttggaatatagttatttgggtttgttttttttattttaggtgtttgttggttgggattatggaagggagaaggagtaggagaggaggggtaggggatgggggtgtagtttattttgagttttttttttgagagtttttggatttagatttgatttagtttttgtttttttagtttttttagtttttgggggatttggttagtgagttagtttttttttttttttttttttgtaggtttgggatgtgttgggatttagaggggtataagtaagggggtttttagaggagggagttgatattataggggttgggtttggatgttgggatttgttagatttattttagtgttatgatttttgaatttaagtgagttatttttagtaggggtgtggttatttttatattaggagagagtgtttgggagtgggtttgttttgagggtttgttgggggttgggagggatttatttaaatggaaagaagtttttggtgatattttttgagggttaggggttgaattttggaagttatgtttttaggtagtttttatgggattttatgttgagtgttgattgggttttatatatttttattttttttattttgtatttttatatgtggttgggggtgattgaagttttggggtatttgttatattggttaaataggttagttatgtttagtggttttttagttagtagttattggtatttgatttgttgttttttattttttatggttaattttttttttaaggttttttggttttatggttttttttatttttatagtgaatggttgtggggagttgttgttattggtttttgggtgttaggttagagttgggggagtgtttgggagaagattgtatgtttggagtttttgtttttatttgaatgggagggaggttggtggtagattagagatttgggttttgagttaaatattgaaatttaaggttttgggtttgttatttaatatttgtggaatttgattttttttatttataaaatgggtattattaatattagttgttaaaattatagtaagatatatatgtttaggttaggaagtgtggttatttagaaaatatagttttttttttttttaagaagttaatttttttagtattgggagtgagaagagtttgttttttttattgtttgtagtttagtttagggtatttttattattggtttttaaagggtagttttagaaattgttgataaaggatgttagaaggaatttttttttggttaggtgttagggttaatagaaagttttgaggatgtagtttttattatgtttttgttttgtgggtttttttttttttgtgggtagaattttttttttttggtttttttttttgaatttttttttttttgtttttggttttaatttgttttttagttttttggttttttaggttttttttagggtttaagattttgtttttttttaagtttagttttttttttttttttgtttttggatttttgagttgggaggttagtattttgggtgttttgttgaggtggttgttttttttgtagtggttttttttgttgttattaaatgagggtttttagagtatagagaaggtatttttggtttggggttgtattttttatataaagtttttgttttttagtattttttaaagttttttattgtttagtatatatttagtatttaggtagagtagttttagagtttttttggttggtttttggtttaattttttagtagaaatggtatatgggttatagatgtaattttatattttttagtatttataataaaaaatgtaagaataagttaggtatagtggtttatgtttgttatattagtattttgggaggttgaggtgggtagattatttgaggttaggagtttaaaattagtttggttaatatggtaaaattttgtttttattaaaaatataaaaattagttaggtatggtagtagttatttgtaattttagttatttgggaggttgaggtaggagaattgtttaaatttgggaggtaaaggttgtagtgagttgagattgtgttattgtattttagtttgggtaatagtgtgagattttatatttaaaaaaaaaaagaaaagaaaagaaaaaggaaattattaaaaaatgtaagaataggtgatattaattttaatattatttatttaatagagtttaaaatattattaatttaatatgtaattaatgtaaaaatgatagatatttgatattttttttttttttttttgttaggattttgaaatttagagtgtattttatatatatggtatttttttatttggaattattatattttaggtgtttaaatggttttgtgtagttagtggttattatgttggatagtgtagtttggagagttttaatttttttttttttttttggttgttggggaatagagttttgttttgttatttaggttggagtgtaatggtgtgattttggtttattgtaatttttgttttttgagtttaagtaatttttttgttttagttttttaagtagttgggattataggtgtatattattatgtttggtggttattttttgtatttttagtagagatggggttttattatgttggttaggttggttttaaattatagattttaattgatttgtttgttttagttttttgaagtgttgagattatatgtgtgagttattatgtttatttttggatagttttaatttgattttaggataatattaggttattagagagttgttgatttggattatattatgatttgaattttttagattatttttggtattatgtttataagttatatttagaggataataggatatagtttggtgaaatatatagtggtattttttataagatattggtgaggttatagattttattattagtgttatttgtttggggatattttatttttagaaaatgtagagttttttttaagaaatgaatgtggttaggtgtgttggtttatatttgttattttagtattttgggaggttaaggtgagtatattgtttgaggttaggagtttaagattagtttgattaatatggtgaaatttagttattattaaaaatataaaaatttgttaggtgtggtagtgtgtgtttgtagttttagttatttaggaggttgaggtaggagaattgtttgaatttgggaggaggaggttgtggtgagttgagattatgttattgtattttagtttgggtgatagagtgagattttgttttaaaaaataaataaaaaaagaaatgaatgttttaggtatatgttaagtattttttagatgattttaaagatattaattattgtgattgatgatgatttttttttttttttgggtgtgtttgttttgtttttttagtttataggtgtttaggatttaaaggtagtttgttataggttatgggatttggttggtttaaaagggagagtgaggttattggaatttttttaggagtgagtttgaagtttggaatgttttttggtggagggttttgaagttaggaggtgatgtagatgtgggggttgagatattatttggggttatttgtaaagagggatatttaggtagtgattttaaggaaagagtaaggggaggagagggtggtatatttatgtttttttaatttttgtttgtttggaggtttatgtattttatatgttggtttttttgtatggatatttttttaataagtaatttattgtgtttatgtttatttattttaaagttatatagaattgtatttattaaaaatgaatttatggagatagaaagtattttggtggttgttaagggttggagagggtgaatggggagtgagttttttatggatatggggtttttttttggggtgatgaaaaagttttggtgttagatagtgttgatggttgtatgatattgtgaatgtatttagtgttattaatggtaaattttatgttttgtgtattttagtataataaaaaaatatatatttaaagtaatagaatttaatgtgtttttttttttttttgagttagtttgtttttttgttttatattttaaaattagaagggttttgagatatattataggtttttagggtaggttgaataattttttttttttaaattgtgttattttatgtggtaatagggattttgtagatgtaattgaagatgttgagatgaagagattatttaggtgggttttaaattataagtgttttttaagagggaggtaggttaggtgtgatggtttatggttgtaattttagtattttgggaggttgaggtaggtagattatttgaggttaggagtttaagattagtttggttaatatggtaaaattttgtttttattaaaaatataaaaattagttaggtgtagtagtatatgtttgtaattttagttatttgggaagttgaggtaggagaattgtttgaatttaggaggtggaggttgtagtgagttaagattgtgttattgtattttagtttgggtgattttgttttaaaaaaaaaaaagaggaaggtagagggagatttgattgtagagaaggaggaggttgtaggaggatggaggtagaggttggagggatgtagttgtaagttaaggaattttagtagagttttttatttaaagttggaagaggtaggaatggattttgttaatattttgattttagtttggtgagattgattggtttttgatttttagtattgtaaaggaaggagtttttgttgttttaagttattgagtttgtgataagtagttatagtggtaataggaagtgaatgtagtttttagtttatttttttgtttatagtaatataggtgtttttttgtgtagaattttgttaggtagttagtgagtgggataggatttttttttgtttttatttggggttttgtgttggattttttaaggttgttgtttttgagatagtgaattttttatatttatagagatttattttaaagttgagaaagtgttttttttaaggggtgttagaaagaaggttttaaggtgtttttgttatatgtttatttgtttgtgggtaatatttatagtttttttttgtgatttatttaatagaagggttataggggagggagtattattggttagtttattttatagtaaggttttattttggaagttataggggatagttgggatttttatttttaatttagttaattgggagaagagtttagaatagttttggaggttgatatttgttaggaagtgtggtgatatttatgtgttgttgaaatatatagtaatatagtagtagagaggaggggatgtggttttatagttttttttttatttatttagtatgtatgtatatatatatatatgtgtgtgtatatatgtattaatttttagtttttaggttttgtattttgtttttgttaagttttttggttattattaagttaggttgtgagtatagagtttagtttttttgttaatttttttttaatttattttgggtaatattttaatgggatgtagtagatgttttttattaaatgttaagagtaatatttttttttattttttgtgagttggtggttgtgtttttgtatgggggtgtggaggaaagggttggggagtaggaatgtggttttgagggttggtatgtatttgtagttgtgatgttttgaggtagtttatatttttatttatagattaattttgagaaggggttgggagtatttatagtttttgttatttttgggttggtaggttggggaaattttgagtagtttgagtgaaggttgtttttaggtaggtatggtgggatagaggggtttttgtatattttttgtgaggtagtgtagttgttgggttgttttagtatatttgggtgatatgttttttttttggtttttttttatttggtttgggagaatgtttaggatgttttaattttaaaaataagtaaattttttttttttgatttatttatttttttaaattgtgaattttttttttgtttgaatagtttaattttttaaagtaggtttatattatggtttttagttttttattgtttatttattttttagtttgagttatttggtgtttgtttgttttattattaatttagtttttgaaaaaatttttatggttagtatttagttttattttatttgattttgagggtagtgtttgatatgtattagttggtttttttttttttttttttttttttgtattttttagtgttggggtttagatagtttttaagggtttttttgttttttgatttagttttttggagtgattatatttttgttttagttttttagtttagttgtttttttatattttgttttaggttttttttttggaatattgtttgtttttagagatttaagtttttattttttatatttttttttttgatttttagtttttttattaaagttttattggttgtttttttttggtgttttaaattagtttttttttgtttagattttataaggttagtttttattttatgattgtttttttggattattgggattattttttattaatatttattttttattttgtttttttttgtttatgtagggttttgttggaggattttttttgttttattatttttttttttaaatagttttttaggtttttttgttaaagttgaaattttttttttgtatttgaggatttttgtaatttggttaatttatttttaagtttgaatttttatttttgtttaaggagtttatgttttttagttaggttttattgttttgtaaattttatttaaaattttttttggtaaatgttattatttttaggaagtttttttgatattttttattatatgtgatttttatttttagagttagattttgatttggagattttgatttttatttatttttgttttttttgagttttttaggttgtaggttttagtttatgtttgtgggtttttgtagtaggagggtttatttttatttttttaagaagtgtttgttttattttttgttaagttgtaattttttataagtaggtatttttaatatgtttttttatttttttttttttttttttttttttttgagatggagtttggttttgttgtttaggttggagtgtagtggtgtgattttagtttattgtaatttttattttttaggttttaagtgatttttttgttatagttttttttgtagttgggattataagtatgtgttgttatgttaagttaatttttttttgtatttttagtagagatagggttttattatgttggttaggttggttttaaatttttggtttgaagtgatttgttgattttagttttttaaagtgttgggattataggtgtgagttattgtatttagtttaatatgtttttttatattttttttgaaaagttattattatattaatagtgtgttttataaattgataataatttaaaatgtgatttattattaaaagtgtgattttatttttaaataatattgttggttgtggtttgtagttagttttattatttttgtgtgatgattattttgtagattagtaatggttttaggtttatatttaatttaattattttgtttttttaattttatttttttttgagttaatattaagtgtgttttagagttgtaaatttatggttgatataaaattaggatttttaatatttaatataaagtaattgggttttgtattggttttaatagtaattataaattatgtttgttttttgtattgggtatattgtatttagtttataatatgtgtttttgttttttttattttttttattaagatggtatataggtttaaatttgttttttgggagtaattgatttttttttggaagatgtgagtagtttttatattatatttaagaagatattgttataagattttatattttttattttagtttttaagggtttatttatttttttaaaaatttatttgttttgttataatatgtgtttttttttttttatttgtttttttaagatatagttttattttgttgtttagattggaatgtaatggtatgattttagtttattgtaatttttgttttgtgggtttaagtaatttttttgttttagttttttaagtagttgggattataggtgtgtattattatatttggttaatttttgtatttttagtagagatggggttttattatgttggttaggttggttttgaatttttgattttaggtgatttatttgttttggttttttgaagtgttgggattataggtgtgagttattgtatttggtttataatatgtgtttttatttttttttttttttttattaagatagtatatgggttttaagtttttttttttttttttttttttttaagattagttggttgggtgtagtggtttatgtttgtaattttattattttgggaggttgaggtaggtagattatgaggttaggagtttgagattagtttggttaatatagtgaaattttgtttttattaaaaatataaaaaattagttaggtgtggtggtgggtgtttgtaattttagttatttgggaggttgaggtaggggaattgtttgaatttgggaggtggaggttagagtgagttgagattgtgttattgtattttagtttaggtaatagtgtaagattttgatttaaaaaaaataaaataagtgggaagaggggagatagtggaataaggagtttaatttgtaattgattgtgaataattaattgagataatttattatttttggattagttatgggttttattttttatttgtttttttgagttatgttttttagtgaaattttatatgtatgtgattaaatttgtttttttttttattaatttattttgagtgagtttaatttatagatttttaaatattgaatttaagagggtagaggaaatgtattttttttttgttataaaaatattttatttttttattgtagtgttgtttgttttatttatagttggtaatttggattttgttttttaaagtttatgaaagtaggatagattgtttgtaggatgtttttgttataaaaggagggttaggtttggtaggaggaaagaaatggaagtggtaaatgtttattttttgtgttagatagaggtattaggtgtttattgttttggggagtaaatatttttaaaaatggaaagaaaaatttttagttttattggggtgtaaaaagttatgattttttttgtggttaaatggttgggtggtttgggagataagtggtagttattttgaagtttagtttatttgtttgtaaatggagggtaatgaaattatttgttgtatgggtgtttgataggttgttgtttaaattttttgtttttttttatggggttttggggaagattatatgagttagtaatataaaagtattttgaaaattatatgaagtgtttaagtatgggggtgttggttgattttaggtttgtttttataagttggtagaaaattttttagagagggttttgtttttttttttggggtaggggttgtagtgttagatttgatggtattggtggttgtttaggttatttggtatgagattgttgttagttttagatttattttaagtttgggagggaagtaggttggggtgggggttttgaaattttttatatttttggtagagatattagggtaggtaaaagtgttatttatggtaaattaagaagtttgtttgaattgggtttaaattagtttagtttagaatggaggttagttttattttttttttttagaattaggagtttagtatattagaggttgagaaaatgttggaatagtttttttatttgtttgtttagagatagggattttaagttatttttttttttagtttattttataaattttttgtgttagattttttttgtttaggagttataggttttatttgggagttatttagggttttaaggtttttattatttagttgtttattttattaggttaggtttgtaggtatggagattagtaggatgtggtttaaatttggttgtatgttgattagttgagtgattttgggtttattttttaatttttgggaggtaatgtttttttatttgtaaaaaggggaaagggtttagtgaggagagtgataagtaaaggagatggtatttgtgtagatggtattgtgtgggtgtttagtggatgattatgtgttatttttttgttttttttttttgtttttgtgggagtgtgggtagtagggagttaagaggaagggagtagttgtttgtttgggatgtaggttgttttgaattggaagagaaaaaggaataagtagtagttgtttattgataagttttatgtatttgtgttttaaaattttaaaggtgtatttgaaagattttttgggtaaatttttttttatagatatatgaaagttaggtgtagtggtttatgtttgtaattttaatattttgggaggtgaaggtaggtggattatttgaagttgggagtttgagattagtttggttaatttggtgaaattttatttttattaaaaatataaaaatttgttgggtgtggtggtgggtgtttataattttagttatttaggaggttgaggtaggagatttgtttgaatttgagaggtggaggttgtagtgagttaagattgtgttattgtattttagtttaggtgatggagtgagattttattttaaataaaaataaatttaaaaaaaaggtatatgaaaaaggtaaaatgttatgagtgttttgttgtaatgtgttagttataaatgggaattggaggattttttaagttatttttttttttattttttttttttttgtatatgtattaatagttttttgggtgttggtagtattaggggatttggggtgttttataggttttgtttgtttagattttagagttaaggaggagatataaaagttaaaatagggtggtaagtggaataaatggggattagatggggtaatttggtagtatttggtaaggttttttttaatgagtttttaaagaggtttagtttttaggggaaggaggtgttttaggtagtgggggtttgtagaggtgaaggtttagggtggggtttttagggaagttgtttaggatgtttgaaaggaggggagtaatttatgagtttggtgatagggttggttataaagtgttatgaagtattaattaggttgtttattagtttttaggatagaaagattatagtagttaaggtgtggggatttgtttatttgatttttatttagtttagaaaatgattgttttagggttataggtaatagtttaagttttgtaagttgttggttatagggtgtagttgtggtaaggtggggatgtttattagttaagttttttaggatttttgggttgttggatatgtttgtaggatgttatgggggtaggttagattaggggtatttttatttttttttttaggttttagtttttaggttagagtgttttttggtttttggggtttttagggttgtagatagatagggagaggtttgtgttatggtgggttatttggtttttgtaggaagtggttagaggttttagtatttggatatagtagttatttttttaatttttgttaatgttgttgttgtttggggtttattttttttaatttttttttttaattagggaggaaagtattttggagtaggaattgggttatttagtttgatattttagtatgattttgtatgattttgggttagttatttaatttttttgggtttttatttttttatttgtaaattaggtagataattttttaaagttttttttagttatagaattttaagtgttaaaataaaaaaaatttataaaaaggaaatatgtgtttagtttatatttttgtttttatttgttaaaaggggaaatggatttgttatggggttttttttttttaaatagatatgggagattttttttatgattgtagaattggagtagtttagaggagtttagaattttttagagtttgagatttataggggaatttattttaatttttttgggatagaagtattgttgtttaatggtatttaatttttattattgttgtagtaaatgattatatatttgtgatgttaaataatatagattagttttatattttattttattaggttatagggaaggtgtttatagggttgtgtatttttttgaggttgtaggggagattgtgtttttttgtattttttgtttatttgtattttttggtttgtggttttttttttttttttaagttttttttattgtattttttagatggtttattgtgtttttaaaaatttttgtgatgatagtgggtttgtgtggattatttaggattatttttttattttaagattagttgattagtgattttagttggttttgttatgttatttaatgtagttttaggtgttggggattaggatgtgtttaattttgggagttattattttgttaattttaagatataggttttggagggagatgaagggtaggattataggtttaggaggttgtttgtgtgggtttgaattttggttttattattaaggaattgggggagtatattatttgtaaaatgggggttggtggggaattagttttttggttgttagtgtagagtgaggtagtgtgtgtagtgtttggagtagttttgtgagtatttgttttttttttgttaaatttataagaattgattttggtttaatggtttttttaaatttttagttttttttggttataaggttaggagtatttttttgtagggttatttaagtttttagtttttttgaaagttttggtttatatgatgttggaagtagatgtgttgtgggttgtttatttatgtatggttattggagaggtttggatgatgttgtttttaatgggtgtatagtgtagggtagggttaggtattaataattagttatagttattagtgtaagtaaggggtttttattgttatttttggtttggggttagggagaagttttgggaggtatttgatttttttatagggagtggggttataggagaatgtatttgaaaggggttggggggtagtagaaagttttttttagaaattttatttttggtttgtgatagatgatttttttaggttattattggggtttatttgggtttttgtagtatggagtttggttattttagaaggatgattgggtaggttagggttattggtgatggtgatggtaggtttttttgaggtttttttattagaagtattaggaggttagagtagttgataagtttttatttggtttttgaggggtagaaggttttgagtagttttttgattttttgaggtttttttattttattgagagatttttgagagtattgagagttattttttggtttttttgtgagagagttggttatataaaggtagttatatatttagtaagatgaatttataatttttgagtttaggtttattttggtttttttatagggagtttttgggggtgtggggtgggggtgtagaagggaggggttggtgttttatttttgggaattaggttatgagttttggatttaggttaaattatagaggttttatttttttttaggttttttgttttttaattatttttgtatagggtattttttttttttttgtagggttttattggggtggggtgaggaggagttatagaattatagtagttgttatatgggggtgttaaggtagggatgttgatgttaattgaatgggtatgggaaggtagagtaggaggttggtgttttgggtttggttaggttgtgtgattttagggaatttattttattttttttggtttttagttttttttattgtaaattgagggagtgaggttaggtgatttgtataattgtgtgaatttgtgttttgtattttttatttattattttaaataatgtttttaaattttagttttttaatgttttggtatttttttgtttgagaaatatttatggttgttttttatgttgtgttttaaatataggtattttggtttttttttgggtgtttttattagggttagaatgggtagtttattttgtaggaatttttaaggatttttagttatttttaggatgggggttggttgtttggaagtggtttttgtttatttttgttgtagtttttattatgaggttagtgtagtaaaataggaggtgtaggtggttggggttaggggttaggttattttttttagtggggtaggagaggggtgagaaaagttggatattgattattttaggttgagggtttgtgtggaggagggggtttatggtaaaggaagtgggaggatgggaaggagtttttgttggatatttttattttgttggttttagttttgtttttgttttatttgtggggagaaagtgaggttttttgttttgttaaattttagtaatgaattttatatttattttattttttgtttattggaaattttttttttattttttggatttgttttgaatagttgggttgtagaagttggtggaatgaaatatgtagggtggtttagaggggattgtgttgaatagtgttgtgtttttgtttatttttttttttgaagataaggtttttttgtttttgttttttttttgggaaagttggagagggggttgaggaaatgggatttattattaatttttttgtgtatgttggtttttagtaggtatttttatattttttaattaggtttgtagggtggaaaggtagttgttgagtttaatttaatttttatttagttgtggaagttagtgtggatggtaaagtatttatgtataaatatatatatgaggttgaggttaagagaatatgtgtttagtttttttttggttttttagtaatgtttttatgttttagttttgttttaagttttaaatggtgtaaggtttttttaggtggaggaatggaagtttttaagaagtttgtgttttagggattatatagaggtagggtttaggagtaaaggtttttagattttgtagtgtggtgttggtaagtttgtgttgttgtatttatattgttttgggatgaaggtgatatgttgattttttttaggtggttgtaggatagttaggaggaggtgagatgttagttaaaggtagttatagataatagtattatggattattagaaatgttatttttgtgttaaagtgtttgttttttttagttgttttattttgtgttaatattttttgggagtgatatgtgtgagattgggttgtgttgatgagtgattattggtatttttagattatattaaggaggggttattttgttgttaattaggtgtagggtaggtggtattggggtatgatgatttgtttggtatggttgttttatttttttttttgtttgagtataggttggtaggtttagaggagaggaggaaatagagttattatggggggtgtgtttaggggtgagttattttaagaagttatagaattagggtatgggagatattgtttagttttgttattaatttgttgtgtgaagttggttaagttattgtatttttttgggttttaggttttgtaattagagggttggttgaagaggtaaatgatagtggttagggatgggggtattgaagttagattttttgtatttggattttttttttgttatgtttagagggaggtttgggtaggttatttaatatttttgggttgtgggttttttattggtgaaatgggaataataatagaattaattttatagtgttgttgggaggattaaaggggatatttattttaggtaaagagtttttaagatagtttggggtttttaggaagtttttgttattattattggatattattatttttgttatggttgttagggttttgtttagtattggtagtttgatgttggtagaggaagggtgaggtttttgtttttttgtagtgttttttttttttttttttttttagttatggtaataatagttgaagtttatttttagttttagtgattggttatttttttgaattaaggattgaaggttttaggtttgttatttaaggtttaggtgtaagaggggtgagttattggtttttgtttttattatatttaggtttttatatgtttttttaaataggtttttgttttatgtgtaagagaagatgttaatttttatgtttggggtgggggtgtttataaatgttttggatgtgagttttgatgggggttatggtgtaggttttgttagggtatttttaattataggggattatttgtagtttatagagggttttttgtaggttaatgggattttgttattttggttgttattttgtttagttatttggtaaggaaaataggttgtagatttagaggtagtatgggtttatatgttagtgagataatataataagggaaggatgtgtaggatgagggagttatggagattttattgtagttttagttatttattagtagattttgtgtggatgttgggtaggttattttattaatttttaggatgtttttgtaggttttgtgggtggatagggtgaatggaggtataaggagggtaagtttgataggggttggggttgggtttggagttagaattttagttagttttgttattgtattttagggtattttttgtagatagtaggttaaagtaaggttgtttagattaaaggggaaggggttttgttttttttattaagggttttttggagattttaatatagatttttagtttatagatattaaatttagggtttttgagaagtgagaaatgtgaaaaatgtatagaatagttgtagtttagtgtttttaatatgttagatttatataggtatatatagtgtttttgtagaggttagaaagttttgtgttgggaagttttttgattgggggaggttttatagtaagtttttttttttgtttatttattaatgggtggaaggttttaattaggattatatgggaagggttagtgggaggggtagagagggaaaatgaataggtaatattaagtgtttggggtggggggtgtaggggatatttaggaggggagggtaggggtgtattttttatttaatttatagggaatgggggtttgggaggtgtaggagaaggttttggtatttttatttttttttttttgtagatttatttatagtttgtttatgggtagttagatttagttataggttagatgtttgttttagttttatttttttggtttattgaaagtaagttaggatagtgagggggatgatgttgttatttttggtatggttatgttgggttttggggtgggtgggaatgtggttggggtgttattttttttggttgttataggtataaaagtttttttgtgttttagtgttatatgtgggttttttttttgttgttttaataggatggatatttaagtagattttgttggttggggggggtttttgtatttagttttattttgatttagtgaattttttttttgttttttggggtaggagttattaggttgggttttaggtaatggttagtgaaggggttgtatggaggggttttttaggtttataggaagggaggttttttttttttgtaatgtggttgtagtattttgtgattgagagggatattatggttggagatggtgggatggaggattttttatagtatttttgatgtttagaatattttattttgtataaaaaagttttaaatttttttgagggttgaagttatttagagttggggtttttgttttttaggttaaaagtattttgttggagtagttgagagtatagtgggaggggaggggtaggagggaatagttttgttatggtgataggggattttttgattttaagagggtttgtagatattattatttatttttagttttgaattgttttttgttaaggggttagaaatttttgggagggggattatagggggttttgtttatgagaatagtgattgtggttaggttatagtttataagttagtaattttgtttagttgttgtggtggtttttttttgatggtttttagaaaaagtgttttattttttgttattagtgttttgaaatttaagaatattttttaaatagtaattgtagtaaaagttaatgttgtgtgagtgttgtaggtattatttttagggttttatatattttttgtttagtttttataaaaattttattttatttttttttttgttttttttttttaatagtttagaaaatgagtatggaagggttaagttggtttgaggaggggttggtggaatagtttgagggtttagtttttaagaattttatattgtaaagggaatttttgggttagggagtagggtatagtttttatttttttatttttgtttttagtattaggtttgatatagatggggttttggttatgaataaatgaataagtgaatgagagtttgttgagggaagaaggtgatagggataagggagaaataaagtagttaatgttgttgtgatgatgatgatgttaatggtagtattgatatgtgggtttttgttatgttaggattgttttaagtattttgttttatgaatatttttgttttttattatgttttgagtggatatttttattagtttattttatagaggggaatatagttgagtgtattggttaaggttatgttgttaggaaaggttagagtttaggtagtatgtggttttttagttgggttttggtttatatggttttataggtagttttatgaaatatgtagagagagtatgtgaggggtttttttgttgttttttatttttagttggggtttattttttgttgaaatttttttaatttgtttttaagttttgttagttatgaaatatttttttgaatatttagtattatttttttatggttatttggttttatttttttatagggtaagttttgggtgaaaagtagaaaggatgaaaatttttgagagaggtgataatgtggtaatttttttttttttttttttttttttgagatagtattttatttttgttgtttaggttggaatgtagtggtatgattttggtttattgtaatttttattttttgggtttaagttatttttttgttttagttttttgaggagttgggagtataggtatgtgttattatattaggttaatttttgtgtttttttgtagagatggagttttgttatgttgtttaggttggttttaaatttgtgggtttaagtaatttgtttgttttagttttttgggattatagatgtgaattattgtgtttggttgaggtggtttttatataaagtagagaaaattatttttagtttaaaataaattaataagtattgagtgtttatgtagaaaaagattagaaggaaatgtgaatatgttaatagtgtttgtttggaggatgtaattattattgattattttttttatattttttaatttaattattttgttataagtaggtgtgatttttaaaattataaaagataaatgttggttttttgtttgtgttttgttttttgagatagggttttattttgttatttaggagttggagtatagtggtgtggttatagtttattgtagttttaaatttttaatttaagtaatttttttatttgagttttttgaggagttgggattataggtaagtgttattatttttagtatttttgttgtttagattggttttgaatgtttggttttaagtgatttttttattgtagttttttaaagttgggattataggtgtgagttattatgtttagtaaagattgttttttaattaggaagatagatgttttttagtattttttgtttttttttttttttttttttttgatatggagtattgttttgttgtttaggttggagtgtagtagtatagttttggtttattgtaatttttgttttttgggtttaagagatttttttgttttagtttttagagtagttgggattataagtgtgtattattatatttggttaatttttgtatttttagtagagatggggttttgttatgttgattagtttggttttgaatttttgattttaagggatttatttgttttggttttttaaagtgttgggattatatgtgtgagttattatttttggtttgttttttagtatttttaatttttgttttttggtattatttggttaagtagatgaaaagttttagtgagttgttagttggtattaggttggggttttttttaggtagttttaagtggttaggatttggttttttttttagagttgggtttagaaattaagattgggaatgtgtgatggttgttttgtgggtttttgttatgaggttatttttttggttttagtgattggttgttggttgtagggagtatgtgggtttagttagggtttgtgttaatatggttttgttttatttatggtttagtgggtttttttattttttgttgtatgataattttaggaaaaatgttaggagggagggagttgttgggggtgtgataggagagattttttagggatagatttgtaaaaattgttttaaagttttttttaaggatttttaaggtttttattgttttttattgataggttatggtttgggtagagaaagttggggatggagttggtggggggagggtggttagtatttgtaaggtaaggagatgagttgggagaataggggttgggagggtagttttaggttagtttttgtttttagaattattgttttttttttttggttataaagtgaggttggttagatataggtttattttataggttgggaggttgggtgtgaaagtattgtgtttgtatggggtattttatggtgaatattattagagttaatttttagggtttgttgttttatagggaagttagtgtaaggtgtttatggaatttagaagtatttaaaggatttgatagttatgagttgggaggatttagttttgtagtaggagaaagagaggtagagagataggttttgtaatatttgttttatttgttgtgttgttttgagtatagtttatttttttgtggttttgagttttagttttgaggtttttaagattttttgggtttttgtagtttaggatgtttatttgaaaattaggtttagttagtagggttttttttgttagtttattattggttagtttttgtttagtattttttagtttattatttttatttgtgtaaattttatattagtattttaagtttttttttttttaggaaggagattgtttttagatgtgttttttgtttttttttgattaaagtttagaaaataggaattagttttgtgttttttttttttattgaattgttggtttttttggatgttttttttgattttttgttaatatttttataatataattagtttttagtttttttttaaatgtaattggtgagtatgttgtagtttaggtggatggtgatgtttttattttgtaatttgtgagagttagtatattttttagttaggtgggttgtaggagttagttgtggtgagggtaggaggtttgtgtgttgatggtattggtattattaaaattatggttagattaaggttatggttaatgagtttttttatttgtaattttttttttattaaggtggttttagttttagttttggttttagttttggttttggttttaggagttgtagatatatttttaagtttttattttaggagtttggttttatatatattggaggatatggagttggggtataaatagttaagaataggtatatttgtaattaggagtagggggtggagggttgttgagatgtttttatttttattggttgttttttttgatggtttattatttattatatattgattgtataattagggttgtgatatgtttgttttttatattatattattaaatttttaaatttgtttttaatttatatatgatgaggtaaatttagagttaataatttgtttattagtttttgaatttatgggtggttttaatttttttttttttagtttttttgggtttatatgagtattgaggtataagggaattttattagttgggaagtgtgttttttttttgttgattttatagtttttttagtttgtgtttgaagttgttaatatttttttatttagtattgttttttgtagtttgagttgttgttgtgtgatttagggttagtgttttaatttttttggattatatttgtaagatgaggatgttgttgtatagtttattttaaatggttattaagttgtttgtatagttaatatttgttgagtttgtgatatgattagttttgttttaattttgaatgtggtatttttatttagtttgggggtggaattgttagtttttttttttttggataaggaagttgaaaggttttagaaggtattaaggttagttgatttgttagtaggtatagtgtttatttgttatttatagtttttttttgattgttttgtttgtttttttagttgagattttgtgtgtatttgaatattttgttaatggttgaatttgtattagggttattgtgttagttgggtttgttaggttattgtttttgagttttgtttaaggtagggttagtgtttatattttgtttttttgttagtgttttatttaaggttttggaaaggttttggagttagagatttggttaaattttggtaatgttttatatttgttgtgtgattatgggttagtgatttagtttttttgtgttttttgggttgttgtgagggttataggagatgtatagagggttttgagtttggtggttggtatgttgtaaaggttagttatgtggtgtaaggatggtattgatgataataaatgaattgaatgaaaattaggttaattgggtttggggaggggtgttggttaaatagatttgagtggattaggattttgtatatgatgagtaagtgggaatagttttaaatagtaagttgggtaggtttaggatgatttagttttgggtgttgtttagggtttttttttggtttttttgttggtttggtttttttttgttttagtttgattgtttttatgggttttaataagtttttgattaggattgaggtagaatagatagggtttaagattttgtaggtaggtatagagtgtggatggtaaaaggagatgttttaggttttttgttgtttttttttttttgaaggttgataatgttaatttatagaagaagttgttttttttggttttggattttattttaatatagtgtatgaggtagttgtgtttaaggggtgtgattatttttgtagatggaatttatttattgtgtttagtttattgttagagtttggaggatgggggaagtgaggtggggtattttttatagtgaagggaaaatttagtttagttatttttttttgtgttgtttttggaatttattttgttatggttttattttaatttagttttttaaagttttagagagttttgtttttttttttgtattttattttgtttatttgtgttgggttagttttttagaagttttgttttttgttatttttagggtattaaggttggttggtgggtttagggatttttattttttgatttagttttagtggtttattttatatttattggtatttataggtgtgttttttatttttggtttttgtataggtggttttatattttgggagtttagttttttttaaggatttatgttagagtatagggatttttgtttttgatttttttttagttttaattatgagtagtttatgttatagtaattttttagttgtttgtagttgtttgttaagttatgataatggtttttgttttttaatttaatgtttgtatatagataaattgttatattttaagtagattagatattattttttttaggaagttttttttgattgttttagttggatagaggttttttttttttgtgtttttttaatgtttaataggtatttattgagtatttgtgatatgtaaggtatttataatataagttagtgttttttgtttttttagagggtatatgaataaataaatggtaagattttttaatatttatttatgttttatagaaagttatttataggtatgggagggttgttttaattgtgggtgatagggaggtttttttaagatggtagtgttttagtaagatttgaatgaggtggttaggaggtttagggagggattttttaggagggaataagtgaatatttttttgtgaggatgagtttttatgttttaggagtagttaggttaggggattggtgtagtgaataggggttgaggggagtggttaggtgatgtagggttttataggttgttttatgatgagttagtgttttaagtatagtagatatttagggaaggtttaggttggggagtgatttgaatagattttttatttaggagtttattggggtttttgggtttatgttgttgtgttattgtatgtttttgggggtttgggggggtattttttatattattattataggtagtatttttgggggaggtgtgttgtgtaggggatttgttggttattttgttgggtaaattataggggattgtgtaggataggtggttagtttaggagggataattatttaagtaggggttagagggtatttggatttgggaggagtgtttaattttttaggtttaggtaattagaggtggggggtggggtgttgttttttgatatgggaggtttgggggtttggttgtattttttggtgtggaggtgttgggaggtgtggaggtttttttttgaggttgggattttttggttattttgatttattgttttgattttattttttagtttgagggtatggtttgaatttatagttgtatatatttttttttgtatagggttttgtggggttggtatagtagttttttttttatagattaggatgtttagttttaggagggttgggattgtttaagattgtataattagggttagatatagttgggttaattttgtgatttttggttttatgtatagattttaagtatataggtaaaattttgttggttgggagggttggggggtagatgagtggggggtagtttttttttagttttttaatatgttaggtttttgggtgggagggggtataaagattttattttttttaagagatagagaaagaggtagtggagggtttttttttggttgaggttttaggttttgagtggtgaatgtaattttatttggaggttggaagttaggtggttttgggggtgtgtgaggtttgttagtttagttgtagttttttttatgtaagggaattttttttaggtagtgtttttatgattagagagggggttaggaagaggtgagggttgtatttagagtgatatttgggtgggttttattttggggatatggttatattttttttttggatttttgaagtttttaggtgtgggttaagggtttttagttgtaggtaggagagggttttatagttatagatttggggagtttagtttgtaaagtttagaggtttttggaggttgttggtttggttttttgtgtagttgggtttttttgggaggtttttttttggtatttttagtttttagtttgtatgattttttatagttgggtttatttttttaggtttgggttatatggtgtaggttagtggggttttgggggagggtagggtgttaggaatagttttgggggtggggggattggagtagagtttattttggttgtttgtttattttgtatgaaggatgttagatttttatatgtggttatttgattttgtttaattatgtgtaagttttggttatttttattttattgatgggaattaaattggttaaggagaagtttagaatttgagtagagtaggggtttaagttttttaggagttttaggtattttttagtttttttttttgagtattgagtttatatatttagtgtttggatgtttatttatttgggggtttggtgattgttagttagtatggtttataaagggtttttgtgtaataggttttatttgatttttttaaaaattttttgaggtaggataatgttatttaatttattttatagataaagtaattgagttataaaatggtttgttaaaagatatagaggtagaaagattaatagtaaagagtttttttgtgattttgattagtaaggtttttagaaaaaagtaagggattttgaggtttttataggaatagagttttggaggagaataagagtttagttttatgttatttttaaggggtattttgaaggttaaggtattgggtttaagtaggttggattgtgttttttgtattttttttattttttgaagtttttttttttttatttaggtgggttgtggaggtgtttataatatataatggaatagttggtaggttattgggttttttattgagttaaggggtttgattagaggtttaaatagtggtatagaaattatgagttttgttgtaaattagtttaggttttggagttaagtagttttgtgtttatagttagggttagttgtttttagttgtgtggtttgaggttagttttttaatttttttgtgttttggtgttttttttgtagtagtaataggaattgttttttatggtgatagtgtagatatattttatgaagtgtataaagttttgagtttagtgtttggagtatgttaggatgtagtaagtggttatttatgatttatgaaatattaataaggtgaggggtggaatgatagtttttttgtgttgtttttaaaatggaaataaatttgtttagtgtttaaagtagtagaaagtgagttaaggataggtttttagtgatatgttttggtagagtgttttttgttggttttaggtagggtttagggtgggtggttattttttagatgagtttattgttggtatttgtttttagagtatatgtttggattttttagatttttttttttttttttttgatttttttttattttgtaatttttattttttgttatttttttatttattttttttttttatttttgtttaaaaataaataatggaggttaaatgtgttagttggttttttggaaaggtttttttgtagtaggaatgtgatgggggtagtggaggattgtttagtgtaagttatgtgatttttgtgtggagttggggaaggggaggtgttgagattgagggtgttaggattgaggtattgagatggggttattggataatggttagggttagtttttgtttttattttaataggggtttttatatttaggggttatatttttaaagttttttggataagagagataaattttattatagggttagaaatgttgtttttaggttgttatttgggtgggggtgagagatgttttgttggtttttaaatatttattttgtggataaaattattaaggggaatttaatgtttttatagtagtttggttaagatataggtattaggttgggtgtagtggtttatgtttgtagttttagtattttgggaggttgaggtgggtggattgtttgaggttaggagtttgagattagtttggttaatatggtgaaattttatttttattaaaaatataaaaattagttaggtgtggtggtgtgagtttgtagttttagttatttaggaggttgagataggagaattgtttgaattttggaggtggaggttgttatgagtggatattatattattgtattttagtttggatgatagagtgagtaagatagttttaagaaaaaaaaagatgtaggtattgttttagggtttataagtataatttgatttttgatgttggtatttaattttgatgtagattttagtaggaaaagggagatgaattagaaggttgtggggatgaggggtttatagtagtgtttattagatttgttttggtaggtataagtgttttttggaggttgttagataagtagagggtttattttagagattttggttttggagggttgggttagggtttaggaagttgtattttggtagggaatttagagttattttgagttttattttggaagtaagagttagggggtagaatagaattggaattaaaagtttttgtgggtttagttttatggggatgggtttggttttatggggatggatttttgtattatttgaggtgattattagtttggttttttgggattagttttgagtgttttttggggaaagtgggatttgtagaggatggttttttaggatttgtttgattatttatttttagtttgtttttattttagtttttttgatttttattttttatttagaattttggagatttggttttggaggtttagagattagaaatgaggggagataaggggagaagtttttttttttatttgttggttatgttaatgggttgattttttaggaagttatattagttattgttattgttttggttgttttgtttggttttgaggttgggtgagtaagtattttgttttgtttgtttttttatttgagttttttgttgatgttatgagaggtttgattatgtgtttaggaggtataggatagagtttagagttgtttaagaatatataaggttgaggtttgggttttgtatttgggaagggttaggaagggttaaaggaaaattttagttgagtataatggtttatgtttggaattttagtattttggtaggttaaggtaggaggattatttaagtttaggagttggagtttagtttgggaaatatagtaagattttatttttataaaaaaaaattaaaattaaaaaattaattaggtatggtggtatatatttgtagttttagttatttggtaggttgagatgggaggattgttgagtttaggaggttgagattatagtgagtgggatattgggttattgaattttagtttgggtgatagagagagattgttttaaaaaaaatttttatattttatggagtttagtagaatttttggttagggtgttttgattgtgaaatgagtgtggtagttgttaatttttgagggtgaagatttatttattagtaatttgtattttggtatggtgagaggaagtgtttggggaaagatgttggttgaggtagagagtttagtttaatttattgtggaggagttattttagttttaaagagaaagattaataaattttaggtgaatggtttaaaagttatttttgtatatgtagagggtgtattttgggatatgtggatatttttttttaggataggaagtaaaattagtaggtagagatgtgagtttttttgtttttgttggagttaatttggagtttttattttggtttttagggaagtatagatttttatttttattgtagttaaaagattttttgttgatttttttagtagtatttagtttagttttgtggggagaggtggtagggggaggagatagagaaagatgagtttttggtagttgtgattggggggagagaaatgtggttttaatttgtttttgtttattttatagatgggtggtgttttattttaaaatttagggtagttgagggattgaaggaagagggggatattttttaattggggtttttttttattttattttatggtgttttatataggaaagagttggaaggttttgggtttttggtatttagttaaagttttaggtaggggtttagatattgggttgtgttattattttaggtagtttgggagttagtgatggtagagttttatttttattttgattattgtatagtattttgtttttaggatagtttagtagttaggttgttttagggtttaaatttagatatttaattgtgggggttttaggtaagtggttgaagttttttgtgttttgattttttaatttggaaaatgggatgatgaaagtaattgttgggtagggtaaggggtaagtgaaagttagtgtttgagagtgatgtggttaggattgttgttgtgattatatattgagttttttttttttatttgagataagggttttattgattgttgttagaaagatttagatttagaaggattaggaaagttgttttatttataattttagagggaaggggaggtttttgtgttagttggttgttgtaggggagagggtgggagatagatgggggatagaggagtaggggtagtaggaggaatggttggtagggaagtttgtttgagatttaaaggattgtttattaggaggatagtttaggttttttttattgagaaagatttttttggatagttgggttgaggatttttaggttttttgggtggagtagaattagttattattgaagttatataggtttgtaagtataagtgggggattgtttaggtatttttgttttataggggttaggtattaaggttagggtggttagaggatatgatgtagtttagtaggggttttgtagaattattagttaagaagatatatgtagaagtatgtaagtgttttgaggaggtaaattttttgttggattgaatatggggagttgagtttttaattattgagttgggttgtttggtttgtttttttttttttgaatagaaggtttttagatagagtagttaggtaatagtatggttaagtaggggtttgtattttagttttgttttgtagtttgattaggttgttgtttttttaggagatatgggattggttagggtttttttaggttgttataggaataaggtagggttgtgattttttttatggtttaggtatttgggggagggattatgagttttagtttaggggatagataggaaatggatagtttgttttttttttaattatggagttggttttttttttattgtattttttttagttatgttttttattagaagattattgtatttaatgggtggttttgtagtgatatttagtttaatgaagttatttggtgggggttttgggggatgtagttttttgaaatatatatgggtagtgggtgagttggaggttgtgtggggttttgttttttggggatggttaggaggtgttttaattatttgtaatttgagtttatagtgattgggatttgttgtttttttattttagtttttttttattagtatttgttaagtgttagttagtaggtgttggtatggtttaaggtaggtttgtagttagattagtattgggggagggattgggagagagatttttagagtggaagttatagttttttttttttttaggttgggtaatagattattatttttagttagttttggggaagggggaggggttagttgggttgtaggtatagtgttggggttttttgaggtggttgttgttgattatggttttttttttttttgggttgggtaatagattattatttttggtttattttagggaagtgggaggggttagttggggtataggtatagtgttggggtttttgtggtggttgttgttgattatgggtttgttattttttttttagttgggttgttattttggttttgaaagtgttttttttagtttttaatttgtgtttaggaggtagttgatattttaagtgttgttatagtaggaggttgggtttgtaagtgtgatttgtttggggaggggtagagggaaagattatttttgtttaaatagtggttttttttttttttttgggggtttttatagggtttttagtttttttttggttaagaggtaaggagaggtaggaaagttttaggaatattggtagagaagagatagggtaggttgttagaggaagtaggttgtagggtgtttaaggttttaggttgggttttgggaggttagggtatgggtaattaggaggtttaggtagggaaatttgttttgtagggattttgggagataggggagaggggatatgatagttgttttttgttgttttttggttgtggtttttaggggttttagtttagattagaagtattttatgtattgggttttggtttagtttggaagtatggtttatagatttatatgattatttgggtagtgatttttaaaaggttttttgttattagttggggagtttttgaggggagggtggttttgtagagtatttggagatattaatgggttgtgaggaaaggaggaggtgtggatatttttatggttttaagagaaaattaaggtagagttggaggttgggtgtggtggtttatatttgtaattttagtattttgggaagttgaggtgggtagattatttgaggttaggagtttaagattagtttggttaatatggtgaaaattggtttttgttaaaaatataaaaattagtttgttatggtgatatgtgtttgtagttttagttatttaggaggttgaggtaggagaattgtttgaatttaggaggtggagattgtagtgagttaagatggtattattgtattttagtttgggtaatagagtaaaattttattttaagaaaaaaaaagagtagagttggaggttaggtggtttttagagtttgataaggaggttgtggggttgggttgtttttttggttatttgaggggtagggattggtttagtttgagttttagatttataagaggttgaattggagtgggattttgagatgaggtagggttattttgtttatatttgtgtttaggttttaatagttattttttttaggaatttagtttgatggttttttaggttgagaggttgttaaggggttgtaaggtgttgtaatgtgtgagttggtgggttttgatgtgtgatagtttggggtattttttttattgttagggaataggaatgaggagttttttatttttagtgtttggtaggtaggaggttgttattggattgtgtgtttaggtgttattagattttgagggtttatggatatggtatatgatttttaatgattaatgtttgtgtagtaggtgttgaggtgttttaattttgagtaaggttgggtttttggaattttttttttggtaggaggatttgtagttgaggaatttttaagaaattttttggtagtaaataaagtatggggttggatggtggatttatgagtgtttttatatgaatgtggatatagatagaaaagatggtaaatatttgtgaataaaaggaatggtttttgtgtattgaatttttatttattggtttttgtttggtataaagtttttaggaattttttaatagttttagttagaaatgtgtttttgtttggttatgtggaaaattttatatatattaagatatatgatgtttttggttttttttatgaatgttttatgttttttgggtttatgatttggaatttgtagatttttgttgtttttgttttagagttataaggattttggatgtaggaaatattttttatgtgtaagggttttttttttttttgttagggtttattggtttttttttgtttataggtgttatttaaatttttgtatttgtggttttttttttttaattattttgtgtaatttgttaatagtttttttatttttagagtttggttgttggagatatataaggtatatagaatttgtgaaatgatattgagtatttattaggtatttattgtgtgttttgtttggtaataataagtaaaattataatgttttgggtatatgagtatatttttttatgtttatttttttagtaatttaatgagatggttttataaatggggaaattgaggatagggaggttagattggtttaaagttataggttaggaggggtagggttaaaatttaaatttagatagtttggtattaaattttagttttttatatgaaaggtattttgtaattttttgagaaggttgggattattatttttattgtatagatgaggaaattaagatgttaaatggttagatagttttggagttaggaggtgggtttagtggtttatgggagtatatggaatggagtttatgggaggtttgaggttgggattttgtattttattttggtttaagggatgaggtgattgggagtgttagagatattttgggattggttatttaggtgttttgtatttagttttagtgttgagtgggtgagggtggataatttgttatttagtagggttgttgtttgtattttggtggttttttaaagtttggttaagtaaagtaagattgtttttggattagagtgatttttaagttatataagtatttagttatgttttggaggatgtaggattgggaaggttttttttttattgtatttttatttagtttttttatggggtagttggttttaggtatagattagatgtttttttttttgtttgttgttggtatgtttttggttttattgttgttttagggaggggtttaagagttttttggttttgttatttattatattttgtttagagggttgggggtttagtattaatgttaagtatttagtagtaaaattatgggttggaaagagttatagtgttgttttgatttggttttattttatattgggtgttgtttttattagtttttttttgtttttggttttattttttaggtattataagttttgtaggtttaaagttaaatttattagtttttgattttttttagttgggattagggtgaggtttttgtttaggtgtaaaagttaaggtagtgttaaaaaatttaggaattaaataatattttgaagtaatattttaaataaattaaattttatgttgaataaattttgatagggttgtgtatgtgtagggttgggtttgttttaatttaaaattttaatatttgtttattatagagattattatgtattattttgatattgaaaaatattgtattaaatattatttgtgttgatttttgagttttttggtgtttttttatattttgtttttgataagtgtttgatatattttgttttagttggttttgttttttaggtgtttttttggggttgttttgtttatgttttttgtagttattaggagttattgagttattgtatttgttttattttgttttttatgtttttgtattgtttattttgttatgttttttttgtgtgttttggttgtatgttagttttagataggagtttggtgggttgggagtttatattaatgttgtttttttttggttttggtgttgggtatagggtagtattggagatttttttttttttttttttttttttttttttgagatatagttttattttgttatttaggttggagtgtagtggtgtaattttggtttattgtaatttttattttttaggtttaagttttgttttttggaattaagtagatttttttgttttagtttattgagtagttgggattataggtatatgttattatatttagttaatttttatatttttagtagagatggggttttgttatgttggttaggttggttttgaatttttgattttaggtgatttgtttgttttaattttttaaagtgttgggattataggtgtgaggtattatgtttggttgagattttttgaataaataaatattattggtatggagatttgtttagggaatttgtttagattttgttattgtatttttgtttgttgtgtttagaggtaatttagggttgttttagttgtttttatttggttattttttggtttttatttaggttggtttgttttattttgtgggttaagaaaatgatttagtgggtggtgattagtattttttttttaatttgaaaagaatatatttattagtggtggtagtaatttaatgttttttagttgatgaaggtaatatgtttgtttataatggaatggtttatgttatggtggaatattatttagggatgtattggtatttgttataatgtggatggattttggaaatatgatattaagtggagaagttagatataaaggttaaatgtgtaattttttgtataagaaatgtttagaattggttaggtgtagtagtttatgtttgtaattttagaattttgggaggttaaggtaggaggattatttgagtttaggagtttaagattagtttgggtaatatggtgaaattttatttttataaaaaatataaaaattagttgggtatggtggtataggtttgtagttttagttatttgggaggttatggtgggaggatggtttgagtttgggaggtggaggttgtagtgagtagagattgagttattgtattttagtttgggtgatagagtgagattttattttaaaaaaaaaaaaaaaaaaaaaaagaatttatatagataggaaggaaatatggaggaggagggtaggattgatagttaaaggttatggggtttttttttaagaaaaaaattttttaaattttttaaatttttaattttttaaaattggttgtggtgatgatggttgtattattttttgaatagattgaaaattatggaattatgtattttaaatgggtggattgggttatgtggtgatttatgtttgtaattttagtattttgggaggttgaggtgggtggattatttgaggttaggagtttgagattagttttaatatggagaaattttgtttttattaaaaatataaaattagttgggtgtagtggtatatgtttgtaattttagttatttgggaggttgaggtaggagaattggttgaatttaggaggtggaggttgtagttagttgagatggtgttattgtattttagtttaggtgataagagtgaaattttgttttaaaaaaataaataaataaataaattggtggattgtatagtagtttatttggattttaataaagttgtttaaaaaaaaatgaaaaaaagttttttttttttttaaaataaataaataaaaagaaaaaaagagagaggggaaaaaaaaaaaaaaaaagaaaatattgagtgtagtatatgtatggtaaaggtaagaattttattatggaaatttggttttattaatatattttatttttatttttattttatatataggtgtgttttggtttgtggtgttaattgtatgtttttttggaggttgtagtttagattggttttgaaagttgttttttgggtaattttaaattttttataatttttgaagtttttggtttgttgggattatttagttttttagatttagttttgttattatttatttaagattgtagttttggggaggggggtttttttttaagggtgtaggggttttgtggttttatttttttttagaatatatattattttgtattgtatatatgtgttttaatatggagtattttaggatgttggttatagttagttatgtttgtatattgattgattgattgtgttttgttgattaattatgttaattattgtgttgtatattgtttttattaagtgagttaaagtaatttttttggaataagttgatggattttaaataagttaaaagatatttttttaggaaaaaaatagtaatgaattttaagaagaaagaaaaatttttaaatttatagatttatggaaaaagtttaagtttttaaagtgttagatttttttaaaagtattaggtttagatggttttatgagtgaatttttgaaaagttttaatagagagattattatgttgttgtttaaaatgttttagaaggtagagggtaaaagaaatgtatttaaattgtttttgttaagttagtataatgtagatattaaaattgataaaaatagtatatatatatatatatatatatatatatatatatgttttatttgttttagattaagtttgttgttgtgtatttaagtaatattatttatttttattttgttgttgaaattaaaatatattttaatggatttatgattttaatatgtaaaaatgaaattatagaagtattagaagaaaatgtgggtgaaatttttttttataattttagaatgtaggagatttttaaataggatgtgaattttaaaagttaaaagggaaagtagagatttgataatattaggattaaaatgttttgtgtagaagaatattttagaaataaaattaaaagtaggtagttggggataagatatttgtatttgttgtgataaagatgtataaataatttttttttttttttagataggattttattttgttatttaggttggagtgtagtggtatgattatagtttatagtagttttaaatttttagatttaaatgatttttttatattagttttttgagtagttgggattataggtgtattattttatttagttaatttttgtagagatgtggttttgttatgttgtttaggttggttttgaatttttaagtttaagtaatttgtttattttagttttttaaagtgttgggattataggtgttagttattatgtttggtttataaagaattttttttaaaaaattttaataagaaaaggatatattttttaaatgaaaagagaatatagggttttggtttataatatatgaagagataattttttttgtttgattgagatgtataaaataaaatattaattggagagtatttggtttttagttaggggtaaggggtataggatttttttgttggattattattgtatagggtttagtagatagttgagtaggttgatgaggggaggggttttaaaaaattttagtaattattttagaggttaatttaggaataaggattaattttttttttttttttttttttttgatagggagttttgttttgttatttaggttggagtgtaatggtatgattttggtttattgtaatttttgtttgttgggtttaagtaagttttttgttttagttttttgagtaattgggattataggtataagttattatgtttagttaatttttgtatttttagtagagatggggttttattatgttggttaggttggttttgaatttttgattttaagtgattagtttgttttggttttttaaagtgttgggattataggtgtgagttattgtgtttagtagattaaaatttaaatgtatatatttttgatatagaaatttattaagagtttattttttagttatgtgtgtatatgtataagtgtgagaatatttgttgtagttttttaattatagtgggaagttggataagtttggtagggttatgggatagttgatgatataattattaaaaggaatgtgttattttgggaggttgaggtgggtggattttaaggttaggagtttaagagtagtttggttaatatggtgaaattttgtttttattaaaaatataaaaattagttaggtgtggtggtaagtatttgtgattttagttatttgggaggttgaggtaggagaattgtttgaaagtggaaggtgaaaggtggaggttatagtgagttatagtgagttgagattgtattattgtattttagtttgggttatgttttgttaaaaaaaaaaaaaaagaaaaagaaaaaggaatgtgttatatttataagtggtaatagtgttgttaaatggaaaaaataaaagttggtagtagaagtttgattttttttgtgtttttgaaaagtttatatttatatattgattttttttatataagttttgaatgattttgtaggaataaaatttaggagaatgttatatttagttgttaatatggttattttttgggagagagttggggaatgggagagaaaaatttttttttaaattttatgtgatttttattttttatttaagaatgattgggtattgttttttttttttttttttagatgggagttttgttttgttgtttaggttggattgtattggtataattttagtttattgtaatttttgttttttgggtttaagtgatttttttgttttagttttttaagtagttgggattataggtgtttgttattatgttttgttgtgtattgttttttaggatgaagaaagggaaaggttatagggagaatgggagttagaatatagagtagggtttttaaatattagtttgtgggtgagagagatatggggtgatattattggtttggaatttagggatggtatgaggtgttgtttaggggttttagataaggtttgtttgttgattaagtaagggttgtgttggtttttgtttatgtgtttgtttaatatgaattttttaggtgttttattttgttttatgaattattattgtttattttaattatgttgtataggaagaattgtgtttatttttataatgagaaaatggattagagaggaaagttattaggtagggtaggggtggtagtttaggtagtgtgagggtaaagttggtgtttttttgttatttttttatatatgagtgggtaaggtattataggagtttatattttaatttttgtgggttattttggaaggtggtagatggaattagtgatttttagggttatttttagttttaggttttagataggggttgtggagtggaattgagtttgatttaggtgtgttgatggtagttatgtaattgtggataaattatttttttttttatttgtattggatgagattgggaatttttattttgggttttttaagagttttggggttttatagagtatatttagtagtagtagtgggatggggggatagggttaggggagttttatgttttttttaattttaattagagtatttttattttaatttttttttgggtttagtgtttagagagaatgggaaggaagtttagttttggttatgggttattttagtttgttagttatagtttatattttaggagttttttttggattgaaggagatagagttatttataatatttatagaaaattttggagaggaagtggagtttaattgaggaagtgtttttttgtagtttttagaaatgaggttataggtgagatagtgtgttagggtggattatatggtatttttttaggttgtttgttggaatttagggtttggttaggggttgtttatattttgggttttgaggtggggagtttgagtgtgtttttttagggttgaatgtgttttttgtttatattgtatagagtatggttgtttggttgtggtgtgtttttttggataggtttgttattgtgtagatttttaattttggtagttgttttgggtttgggaggtggtgggtatagatatagttttttttttttttggtagttgttttgattttttgggataagtgttgagaggtggttttatttagtgttatgtgtttgggggttggggttttattttggggttaggttgggtggttagggttatagagttgtagggggtggagtagagaaattgtttttagtgtttgttttttggttttatttttttttgtagttgtgttttatttaaggtattttatagttgtttggtatttgttgtatttttggattagtttttttttttttttattattgtatggtgtttggtaggttggtgaggggaggggttttttttttgggttttggagttaggttttgttttttggttttattttgttttattatgaaggagatatattgggtttggttaatttttttgtattgatttttgtttttttagtatatgtgggattttttattttagatttaggtttgagaggttttagggatagtttggagaaggagggtatttgtttttagaaggggaaagagaaagagatttaattttaaagtaaaaggggatttgggtgttttttgtaagtagtttaggaaaatgggaggaggtgggagtagtgggattttttgagtaaggtattttggtaggaatgttagtgttttttggatatttttagaagtagaagtatatagttttatagaaaaattttgtaggtttaggatttgaggtatgatatgatttaaatttattgttttattagatattagtgagttttttgatgtttattaaggttttttgttttatatttggtattggatgaatttgtatattttgttttagggagtttatagtttagggataggtttagagtttatgtggggtgttttgtaaatatggggttagaagttgggttgtttatggggttttttttttttaaattatagtggttattttttttttaattttatagtttttgatttttattaggaatttttggggtttagtaggtgttttttttttgtaggttgatgtttgttttttttattttttatttaggtttagttttgattttattttttttaaagttatttttttattgttttgtgttgggtggttttagggagttttgtgttttgattaattttatatttaatgttgtattggtagttttgttgtttgtgttgagatttttttttgttttgtttttggaatatatggtttggtgtggattaagtatgtgaagagttatgtttattattattagtttgggggggtttgattttttgtttttttaatgttttatttatatgataaagatttttagattttttgggttataggaaaattattgagatatgttgttatgtttattttgttttaattttatatttatgtttataagtggttttagaattattgtggattttttttttggtttttggggtgggtggatatatgagagtttagtttttagttatttttgtagatgtttttttgatagattaagaaattgaggttgggaggggtggaatgatagtttagaattagttgatttatggggtagagttgggatatgtttagaattgagttgggtattgggtttggttttttttttgtttttagtgagtattttaagaaggtagagaattagatttatgaatgagtgttgagtatttgttttataaggtagttttggagaaatttggttggtgtggttgaggagttggaggggggtaattttggtggggggggttttgagttagtagttagtttttgtaggtttagtattgggtgttgtagtttagttttattttattttatttagaggtatttatgttggggggtaggaaaagagtagggatttaggagaggaggtaaggttgtttttatttagagtttgagaggattagggatgattttaaaggatgagtgtttttttgtgggaggatagtaaggagggtgttaagtttaggggtagggttagagttttggaaattgagaatttattttattagtataaagtttagattttattaggttttggggtggaggagtaggtagggatgtttttgttttttgtagtgttttttttttttttttttttttttaattatttaggtgtttatatttttttttgaaatgttgattttttttagaatttttatattgaagttaatatttatttattgagttttttagtataatttttagaggagagattaggtgttttgggggtaaagttgattaggaaagtttttgtttggtttttagggatgatttatgggggttattatatttgtttataagaattataaaaaagttattttaatttattattagtggtttatttttttagtataattttatggtatatttattatgtttaagttatttatttggtattttatgggattttttttttttttttttttttttttgagatagggttttattttgttttttaggttggagtgtagtggtataattttagtttattgtagttttaattttttatgtttaggtggtttttttattttaatttttttagtagttgggattataagtgtatgttattatgtttggttaattttttgtattttttgtaaagatagggtttttttatgttgtttaggttagttttaaatttttgggtttaagtaatttgtttgttttggtttttaaagtgttggatttataggtatgagttattgtatttggttttttatgggattttttataaaaattaagataggttgggtatggtggtatgattttagtattttgggaggttagggaagttgaggtgggtgggttatgaggttaggagtttgagattagtttggtttatatggtgaaattttgtttttattaaaaatataaaagttagttaggtgtggtagtttatgtttatagttttagttatttgggaggttgaggtagaagaattgtttgaatttgggaggtagaggttgtagtaagttgagattatgttattgtattttagtttgggtgatagagagagattttattttaaaaaataaaaaataaaaaaaaaatataaaaaaaaataaagataatagttttatttttagaatttagtgggggtatgaaaggaattttgaagattatatagtaaaattttaagtatggatattgttggtttataggtgaattttaggtttttttttatttttgtattttttgtattttaaagaaagggtatttgattattttttatgatttgaaaaattatttttatatttaaaaaaaaaagtttagtagaggaaagaaagtttatatataaattatttatattttaagttaaatatgaggtatttggattaggttttgagggatgtataggagtttattaaggtagtgatgtaaagagaagtagaggttagggtttaggaggttagggtaaaggggttgtgaggaaaggtgtgagagattaagggaagattaaagtaggagaagttgggaaggagagaggtgtgagttgagtaggagagtgaattaattgtggaggggtttatggtgagtgagtagagaaggtttagtatgggaagagattttagtagtgttgtgttttggggaagttagtttgggagtaatttagttggggttttaggagattttgttttgtatttatagttttggggtggagataaattatagtatagatgtttttttgtaggtagaagttaaggggttgggtgtttgtttagagggtatggaattttttttatgatttttttttttatggtgttagttggatttttggtgtttgggggatagaggggttgtagagattggttagagttgtgtatgttggggtttagggaatttttagtttagttttatatggaggggtagaaggggatgggtttgaaggaaagatgggtaggaagttgagttggagagaattggatttgtgtttagaatggttgtgatatagagagggaggatggagaagtaagtaggtggtgttttggaggaagaattagtggggtttaggtttgggttttttgagaagttatttttattggattttaagagtatttttttattgggaaggttttgtttttgtttgtttttgtattttttttatttggatttgtttaggtttttaggattgttagtttagtttatggatttttttatgtgagttggatttttatttgtataggtttttgtttgtgggtggttgggtttgggatgttgatggtttttttttatgttttggttttaatgtgtatattttattttatggagaaagttattgtttttttagagtgttaggtttttggtagttttgaatgttgttgtttttatgtggtttgttttttttttttttttttggtttgatgaaattgtatttttattgttggggaagttttttggatattttttgtgttttagttattttgtttatggtttggtgagttttagaaagtagagtttgtaggttgtgtttttgggtttggtttttggtatagtttttggtataatttaggggttaaattgtgtttgtttttggaggagaatgtttttgtatatttttatggatatttttttatttgttttttagagttaggattatgtttttgtgtatttagtattagttattattgagatttagatggtttggtgataattgtttttttagttatattttgtttgatttagttgagtgtgaatatattaatttaggatgggggtgtatttggtatgttaaataaaggttttgtattaatagaaggtaggggaggaaatagttttttgttattttgtaaattgtttatgtttttggtttgatattatgttattagtaattattgttattgagtttgggtggttggggtagggtggttttttagagttaagtttagagagatgggagagggaatatgggatttgtatattgagggttggaaaggattttttaaggtttattagtttttggttatttagtgtgttttgatgttttttttgtaggaaatgtagagttttaggttttagatttgttaagataaatgtgtattttatatgtttatgaaagtatgaggagtattggtttttttttaaatttatattttttttaggttttatatttttttagtttttaagtttattgattattggagaatttttatttaaaaagaaaaattaaaaaggggttgggtggtttatgtttataattttaatattttgggaggttgaggtaggaggtttatttgaatttaggagtttgagattagtttgggtaatttagtgagaatttgtttttataaaaaaaatttaaaaattagttaggtatggtggtgtgtaatttgtggttttaggtatttgggaggttgaggttggggaattatttgagtttagggggtagaggttgtagtaagtagtgattatattattgtatgttagtttggaggatagagtaagattttgttttaaaaaagttaaagaaaagttaaagaagatggaaagagggatttagagagatgtggaagtaatttaagggtttattgatggaggaatagttatataatataagtgtattgtataatagaatattatttagtttttgaaaggaaggaaattttgttttatgttatagtatgatggatgaatttttaggatgttatgttgagtgaaatgagttagatataaaatgggtagttattgtatttttttatatatataaggtttttagagtggttaaataaatttataataaagatagaaaatagaatggtggttgttagtagttgggggaggggtatggggagtttggtttaatggggatggagtttagtttgggaggatgaaaagggtattggagatggatagtggtggtagttgtgtaatattgtgaatgtattgaatgttgttgaaatgtatattgtaaagtggttaaaattgtatattgtatgttgtgtattttattatggttagaaataagaagtagtagttaaattaaaaatttagattgtgttgtttgtttaatttaaagaaggtttattgagtattattgagttttgattttgtgtttagaattagatttggtttttgaggggtttttaatttagttggtattttattatagttttatggagttatgatttttgttggggttagggggtatgtttttgagaagggatttaattatgttttatagtttggtatttttaaataggttttgtgttttataggattggtattaattttttgtttgtaagttttatgttagtatggttgtgggtttgagtttttttaggatgttgttggagttttatggtttttttttttttgttagaagggtatttttaaataaaattgtgtgtagttattatatagttttttggtttaggtatttttttttagtgttttgagaattttgttttgtaggttaaggtgttttttatgtttttttttttttgttataattattttttttgggggaggaggattagattatgggttttaatgtaagttttaggaggtatatgtttttttttttttttttaagtttttggtttttgttgggtatatttaggtagtttgtaattttttaagtaggagttattagaatgtgatagtttttttaggggttttaattttattttgttttatatttttgtatgagtttgttttggtttttgtgtggttttttattttttaagttttttaggttttttagggatatatagtagatagaggttttagtaaggtttatggtgatttataaaggaggttttttgaaatttagaaaatttttttaaatttttatttaagttttgtttggggtattttggtatgtttttattagatagagagagttattttttttgagtttgtagatttttatttttatgtattttggtttttttgggtttttagggtagtattttttattttatatttagtttttttttttaagattttgtggtaaagttagtaattaggttttttattattatagtatttaagatttagtgttttgtgatttatttttttggttttggggtgtagttttagttatagggggttggggtttgggttttagtttgttttgtagttgagatataggggtaggttttgaattttttaaggtttgggttgggttgggggtggtgggtgttttagtaggtttgggtatttggatttttatttttttgggggttgtgttggtggtaggggtagtgggtattttggggattttggaggtagggggttttattttttggtgggttgatttttggggtttgatgatggtgatttttgttttttgaggggttggttttggtgttttgtggtttaatattttggtttttttgagtttgaattgggatgggttgatggttttggtgttttttatttgtttggatgagatgttaatggatagtttagtgtgttgggatattggtttggttgttttggggtttgagagttttattttttgtagggatgttttgggggagtgttggtttagggagtttatatggtgggttgagggttttgagttttttatgtttaggttttggaatttttgggtggagttggttatagtggtttggagtaggggagtttggattttttggggtggggtggagttgggtgttttgatttttttgattttaaaagatttttttaaggttgaaaaataaagagaggggatgtaattggtgaatggatggttagggaatattttggtatgttttttgttaaggagtagtagaggaaggtaggtgatgtggtggtgagggttgggggtttttttttgttttttatgttttagtaagtggaagggatagttttattttaggagaattattatgagttttggggtagagatgtaggttggagtgggaagatgttgtttgttgtgttttgttatggttatggtgtaaattatatagtttttttttttagttatgtttatataggaatgttttagttttagagaagatttttatttttttttttttttttttgagatggagttttgttttgttgttttggttggagtgtagtggtattttttgggtttaagtgatttttttattttagtttttttagtagttgggattataggtatgggttattatgtttggttaatttttgtatttttagtagagatggggttttattatgttggttagtttggttttggatttttgattttaagtgatttatttgttttggttttttaaagtgttgggattataggtgtgtgttattgtgtttggttttgattttttttttgttgtggttgtttttatttttttttatttttagttaaggtatatattgggatattattagtaaatatatttttattattagttatagtgggggatatgtttttaataataagtgattgtaattgtaattaattagaattgtagtaggaataaaattttattaatgatattaagggtggatattggagtttttagtgttggtgaggtgttgggtttattgagtttattatatttgtagttgtttaattttgggatgtaaagaatattagtatttttagtatagatggggaaagtggggtatggggtagatatagagttagattgtatattaggttgatattagagtttaaggttttaattatttggttgtttggtttttttagtttagtttataggaattaatttttttagttattagttttttttgtatttttttatttattattataagtttgtgtagtgatgttaattattagtttttgttttgtagttattttgtttttttattagggtttgtttttttggaggtagtggggatggtatttgggaagttgttatttttatagtttttataattgtattttaaatgagagttagttgtttttggttattagggttagagtagggagggatttatatggtaggtatatttattagttttttttttaggttagatttatagtgtatttttgtggagatttatagtgtttttttagttgttttttgttttattaggttatagagtttgggttttatgggattttattattgttttttttgtttataggaaaagggatgatagttggtttttagtttttaataatagtgttttaggattaattttagtgttttttttttatttgtttttttttttttaaatgtatttaggtattggggaggggaagaggaagtttaattttttaattttggttgttttagttgttagttttttgggtaaggtatttttgtgggtgttttttttaagttataggtattttttttttttggtggatatagatgaaattttgggttattaagtttaatttttattagaagttgggtaaggagttgtgtggattttagagaatttttagttgttataggttttgttttagttttgttattgttttagaggatatgggtttggtgtggttagagttgtttattttttaagagagtagaaatttggatttttatatgatattttttgatttttaaatgttggtataaagtaaaataagttttttttaaaatattgagtagtttggttgatgtggtgaaattttatttttattaaaaataaaaaattagttgggtatggtgatatttgtttatagttttagttatttaggaggttgaggtaggagaattgtttgaatttgggaggtagaggttgtagagttgagattgtgttattgtatttagtttgattgatagagtgagattttgtttttataaattaaaattaaaaataaaataaaatattgtagggttaaataaaattaaatttataggttgtatttgtttatgggtttagttatgatttttagttgattatgtggttgtagggtagtaggatattgagttttagagttaggggtgtgttaggtgtgggtttttgatatggtgtttttttgtttttttgtattttgtatgtaaattgttggttgtgttttgattttgtagaagttttagggttttaaggaaaggttgaatgtttatttttattagttagaaagtttagggtttaatgtttagaattgaatgtaatgagatgggtttattaagtttattatatttatatttgtttaaatttgggttgtaaagaatattattattgtttttgtatagatggggaaagtgaagtatggggtagatatagagttagattgtatattgggttgatgttagaaagtgtagagtttaatgtttgggtttttgtgtggtttttagggttttttgtggttttttgatttgttttttgttttttgagtattgtttaaattgtttttatatggtgtgtttttgttttatgggtgttgtagagtaggggttggtttttaggtgtttttagtatttttttgtgtggttaagttggagaatagaaattagataggagaaggttttgttttaggtttaatttaagaaaataaatgattttttttgggagatttggtgaattttttttttgggagtttttttggagttatttttattatggttaatttatgattgaagatattgtattaaagtagaggttgttttggtgtgagtttatgattgagtttatggtgtggatgtaatgatttattttagttaggtttatgtgtataagtggattattttagaattggagttggttttttttttagggtattttttttttttttagttgtttgtgtggttggtgttttattattttggttatttgtgtaaaatgtatatgtgtgttggtttttaattattttttttttttttttaatgtttggtgtttttttatggatgggtttttttttttttattagttggtttttgtgtttattgtttggttttatgatttttttgggtgttttggtttagtattatttttatgtttattagtttttagtaagttttgagatagtaggggttgttttatttgtaggggttattttattattaggatggtgttgtttaaaggtgagtttgttttagataatagttaggagattttatagtttttagaattgtaagagaatataattgtgtgttagaagaatagtgagaataggaggtgttttattttggaggtgtttattttttttaggagatgttttattttgggggtgtttattttttttaaggaaattatgttttggttggaatgttaagaaggtgatatttaaatgaagaggtgtttattttggtttatgttatttttttaaatgagtatgttattgtttttttttttttttgggaattttttttaaagttaagtttattttagttttttttttggggagttggttttttatatagtttatattattttttttttatgttattttggttatgttatgattgttgagattggttatgaggggtgtgttttggttttttgggaatagagttgaatgttttttattttatgatattatgtttttattaggttttaggtgtttttagaaaatttattaagttaggtgtggtggtttatgtttgtaattttaatattttgggaagttaaggtggatagattgtttgagtttaggagtttaagataaatttgggtaatatggtaaagttttgattttattaaataatataaaaattggttaggggtggtggtatatgtttgtaattttagttatttgagaggttgaggtgagaggattatttgaggttaggagattaaggttgtagtgagttatgattatattattatattttagtttggatgatagagtgagattttgttttaaaaaaaaaaaataattaaaatttattaaatgttaggtgtggtggtttatgtttgtaattttagtattttgggaggttaaggtaggtttaaggtaggtggattatttgaggttaggagtttgaaattagtttggttaatatggtaaaattttgtttttattaaaaatataaaaaattagttaggtatgggggtgggtgtttgtaattttagttatttggaaggttgaggtagaagaattatttaaatttgggaggtagaggttgtagtgagtttagattgtgttatagtattttagtttgggtgataaagtaagattttattttaaaaaaaaggttggattataggattataggataggtataagttttgagggagtttttaaggaggagggatgtattagatttttatttttattttagtttgtgaagatttatttttgtttgaggttttgtagagggttgattagtgatttttaaaaagatatgtttaatatttaattttaagaatttatgaatgtgattttatttggaaaaagggtttttgtagatgtgattagggattttgggatgagattattttggatttgggatgggttttaaatttagtgtttggtgtttttataggagaaaggtagaaggggatttgggatataaagagatatggtggggagggttatgtgatgagagtagagattgtagatgttgttagagttaaggagtgtttgggttaatgtaagttggaggaggtaaggaagggttttttttttgagttgttggagggagtgtggttttgttaatattttgatgttaaatttgtggtttttagaattatgagtgaattaatttttgttgggttatttggtttttagtaatttgttttagtagttttaggatatttataatgagatttttgggaagatgaaatttttggttgtatagtggtttagggtgaggttagttggtgtggttatttattttttagtttagttttaattttattataattatatttgataaatggtttattgtgggttaatggatatgtggttattttagagttgttatattaggagtttagaggagtgagagttgtttttttttttttttttggagttgtataaaaattttagatggttggagaagttattggaggaattatattattttagatttttgttttattgttgggatatgtggtaatgaaataagattatttttgttagggatgttttatgggtaattgtttttttatggaggatattgtgagttgtatttagttgggaaatattaggagatgtttgttattaggttggtagaatagggttttttagtatttttttttttattagagttttaagattgtgttttgggttttgtagttatatatggttgtttttttttttttaatgtgtaggttttttgggaagttttttgttattatttttatagtggaattggtataatttgtttaggggtagtaggtttttgttattttatatgtttttattttttttgtggagggagatgtagttaaggggtatttatatttatttatagaagtgagagtgtttgtgagtttgttattttgtagattttagaattttgtatgtgattgtatagatttataggtttaattgggtagatttaaaggatttatgtagtagggaggagtattggatagtttttttttttgtttgtaaggagttaatgtaattgaaggatatagaagaggtttttagttgagtattataattgtggattgtgtatagtgttagaaagatgtggagttaggttatgttgggaggatttttatgttgttattggaaggtaaagtagtgttatttttttatttatagagtaggaggtttttatttttgttagttattttttttatttgtgaatttaagttttttaaagttagattttaattttgtaagtttttaaaagtttttttgggttttttttttaatttttattgattttaatttgttttaaaagtttgaagattgtttatgtgttttggtttatttttgggaatttattttaaggaaataattagaagtatagaaagatttatgtatgaggatatttgtattagtattaaattgataaaatttggaaatagtttgggtttttgtagattttttaaatttatatgttaaaggtttgtattattattaaaattatatttttgaagatgagaaatgttgagaatattaagtaaaaatagtaggatataagatgtatataaagattttaattttattttatatatatatgtgtagtttgtatgtatatatatatttatatttgggtagaaaataatgatttttggatggaatgaatggtggtgggtgttgtttattatatttttttgttttttgagatgtttatattatatggggattatttagtatgtttagggaataaaattattgatattgtttttttttttttttttttttgagatagttttgttttgttgtttagattggagtgtagtggtgtaattttggtttattgtaagttttattttttaggtttatgttatttttttgttttagttttttgagtagttgggattataggtgtttggttattatgtttggttaatttttttgtatttttagtagagatatgattttattgtgttagttaggatggttttaatttgttgattttatgatttgtttgttttggttttttaaagtgttgtgattataggtgtgagttattgtatttggttaatattgtttttaaaaaatatattttggtattggttgggtatggtggtttatatttataattttagtattttgggaatttgaggttagaggattgtttgagttaggagtttgagattagtttgggtaaatggtaagattttatgttggaaaaataaaattaaaaaaaaaaaaatatatatatatatagattttgatgttaataagttggagggtgtgggtaattgtatgttggtttatttttatttttatttttggaaaaatattttatagtttaggatgggtatagggttttttttatttttaagtatttatggttttagttgttatataaaaagaggttatagtgggttattttttagatgtaaatttttttttttaggtttatggtggggttgaaataggagtagtttggatttgggtttatttagagaggaatgtgttgtataagggattattgttaaggtttttgttttgattataggttgtttggtaaattgtttttagtttttgaaattagattaagtattttttggtgtatatattaggttttagtttggggagggaatattaagtgagttatagagttttgttttagtttgggataaatgttatgtaaagaaatggtagagtttaaggttagaataattttatgtgtagtttagtttttgtaggagggagtaatgtggtttttgtttagggtagggtggaattttaggtttaggttttaggaatgttagttttggttaaattgggttttttttgagtagtagtaaagtaggttttgtttttgaagaaatattggttatttaggagttagggttagggtttagggaagttggatagatggtgttaaggagtagggaagtatttttttgtatgttattttgagtttgtaggaaaaagttatgggaaaattttatttggtagataattttttataatttttaggatttatagagtgagtttagtagtatgtatgttatgggtatttttttgtttttatttttttgtgatattggattttggtataggtttttgatttgtgtagggtggggtgggtagttaggtagggttttggtgttggtagagtggggtttagttgtaaaggtttttttattttttatttatttaggatttgggggatgaggtttaaaggtttggtgtgtttttaaggagtttaaggattgttttagggttggagataggatgtatgggtttgtatagggattgtgttttttattttagggttgagagtaggagaattaaataggagagtgatataattatagtttattttgagttttagtgtttttagtgttatttgttgtaggaggtgatggggtaataaggtgtttttgaggttaggtgtggtggtttatgtttgtaattttaatattttgggaggttgaggtgggtggattatttgaggttaggagtttgagattagtttgattaaaatggagaaattttatttttattaaaaatataaaaatagttaggtgtggtggtgtatgtttgtaattttagttatttgggaggttgaggtagaatagtttgaatttaggaggtggaggttgtggtgagttgagattgtgttattgtattttattttgggtaataagagtgtaattttattttaaataaaaataaataaataaataaaaaataagattttttgggtgtaggtatggtatgtggtaggggtgattgttgttggtgtaattattattttttgggtgtgtgtttgtgggggttgtgtatgttgaaatgtgtggttattttgttggtgattaaggttgttttggttttattgttattaattatgtttattgattttatatggtttatttttgtgtttttatttagagttttttttagtgtttaagtttttggaaggttggaaggagtgagtagtgtagtttttggttaagaattgaagtataaaaattttagtttttttatttaattttaggtgggataaggttgggggtatggtttgtagtttttttatgttgtttggtatgggggttgggtagttatttgtggttataatgagttggtgaggtattttttattggttggattttttgtttggtttatttttatatttaggtattttttggtgtttttttttattgaaatttttgttttaggatttgtttttggagggatataaattagttttttagaattggtttgggttgtttggtggaggagggaggtggtttttggggtaggtggagtaggttttggatagggaggaggatatagttggggtgatggggaggggtgtgtttttaggaagtaaaattgtttaaaaggaaaggtttaaaaataggtgtagtgaagttgagtggagtttgtaaagggaagttaggaaatagtagtgttagtggagggtggtttttaggttttttatagagagttatatttgtttagggatagggataatgtgaatagaaggtaaagtttatattaaggtggaggaggtgttttttttttagagagttgtagttagatagtttaaatttgttaaaggtttgggagggaagaattagggtattattttatttttagtttaattttttttttagttttttttttttttgtttttttaaggttaggtttggttgggttatagtgttagtagttaagatttgtttttagtgttggtttagtttgtaggaggttagtttggtggttaaaggttattgattgtttaggtttatttgtatatgtggtttaatgattgaggtttgggatttggggttattatttatagtatttttggataaggaggaaaagaattatttttattaatttttggatggaggtgtagggagtgttaatagtatttttgaaaattttaaatgtattaggggggttagtatttagggaagagttataggaggttattttgatggattttgatgattatttttgtttaagtgttaggaggaggtttttttttttttgtttttggtaattttgggtttaagaagttttaggtattttggaggttttttttgtttattatagttttatttaagaggtttggtttattttgtaatgatgatgtgagaatgagtaggtttgtttagtgttagagtttgtggttggatttttggttgaggttaagagaaataaataagttttttttttttttttgtatgttataggaagagtagtttgttggttgtaaggggattttttattttgtttatggggtatagtagtttatagtattttttttagaaatggagtattggtaggtttgggtttttgtaagatggaatataaaggggtgggtagttgattttaatagttagtttttgggattttaaatttttttttattttttaattttgtgatgttaatttttttttggataaagttttttaataatttggtaagttagtattagttgaattagttttagtttgaattagtagttttttttagtttagttatagttttatttttttagaagggaaaagaagttttatggatttttttataaggaatttttagaatttgttatggtgtttgtaggggatattggtattaattttgggtttattaaatgtagtgggtttaatagtgttttttaaaatgatatgttttaagttttaatttttggaatttgtgaatatgattatatttggaaaatggatttttgtagatgtaattaaggtaagggttttaaggtgagattattttgaatttagtgggttttaaatttaatggtgagtatttttataaaagatagaaaaggagaaagatatatagatagggggagaaagttatgtggagataggggttagagattagagatgatggtgatgtgtttgtaggttaaggaatgttaggaatttttaggagttgttggaagttatgtttgtaagtttttaggttgtggtattttgttatagtaattttaggatatagattttaggaatagaatatagaaaagaaatgggaggaggtttagagtttgttgtggttattttagttattttatttgatttttttagtgttttgttaattttgaagttttttttagttattgagttattggttttgaaaaggagatatgggtgttttggagttggtttagtttggtaggaggtagttttgttttattgtttttttattagttattagtttatataggttttttatagtgggtaagtgtgttgttgttttagtttttgttggttttttttttgtttggttttattagttgtagagttttttgttgttgttttttttggtttaagaggtttatatatttagtttttttgggataaatttagtttatatttgttgttttattgtagttatttaagggttttttttattaatgtgttttttaagggatagtaagttatatggttgttttatttggggttagaattgtgttttattagagtaaggttttggagtaattatatttagggttagggagttatttgtttaagaatagaaatgtgtggttgggtgtggtggtttatgtttgtaattttagtattttgggaggtagaggtgggtagattatgaggttaggagattgagattattttggttaatatagtgaaattttgtttttattaaaaatataaaaaattagttgggtgtggtggtgggtgtttgtagttttagttatttgggaggttgaggtaggagaatggtgtgaatttgggaggtggagtttgtagtgagttgagattgtgttattgtattttagtttgggtgatagagtgagattttgttttaaaaaaaaaaaaaaaaagtgaaatgtgtagttttttttttttttatttttgaaatatgaaggggaggtgattgtaggttttttgggaaagatttttttattttttttttttttttttttttttaagatggagttttgttttgttgtttaggttgtggtgtagtggtgttatttttgtttattgtaagttttgttttttgggtttatgttatttttttgtttttgttttttgagtagttgggattatgggtgtttgtttgggatagttatgtagtagtttttgttttaagttatttttttttatgtagagtagaattaggattatagtaaaggttttagaggaggttattgtttatagggttttgggttttttttttgaaaggtagtttagtttttaagagggtaatagtgattgatttgggatgaaggtttttttgtgtttgtttttgttatttattgtgtgtttttggttttggtagttatagggttattttaggtggattttaaagtggtgttaagttgttggatttttttttttttttattaaattagttatgggaatgggagtatttttggtatatttttagatgtgttgtattggtttagtgttttttttatttttgggttttaaattagttgttggttgttttattaggagtagattgaggggaaatgggtggaagttgtaggggaagagatgtgaggtagataaagaggaagaattttttggttggggtggggttgttagggtttgggtgggagggttgtttattttttgtttttggtggaaggtagtagaagggtgggatggatttgtgtgggagggtttaggtgtggtttgtttgggggtaggagagggattagatgattttttaggtttttttgggttaaagattttttgataaatggttgttgttgaaggtaggagtgaggttttgggaggtgattgattttgaaaaattataggttgtagttttgagggttttaaaggttaagtatggagttttttaaaatgaggttttttttagttttaatttatttatgttttttaggtggttttagatattttgttagggtttttttggtagttttttgtttttgattttggagatagagaaatgtgatgttggtttttggtttgtttatagtttttttgtttttattatagggttgttagttatttttttagtttattgtgtgttttttttttttttttatttttgattttttaataatagtagatttttttttaaatatttttttgtttagattttgggttttatgtatgttgtttttagaaatgtattttagttttttgtgaggagttagtaaggttgtttggtgtttttttttatggatgggaagttttgttggggattaggatttggatttggagattttgaggagtgtgttggttagtgtttgttttgaggtttgggatagagttgttaggtataggtagtattggtgtgagggtttagttttttggataagtttttttttgtttgtttttagatttgttattgtatatataggtggtgattatttttgatttgtttgggtagagaagttatttttttttttttttttgttttattgtttattaggggaaatgttataagtatttaaaaaatgtaaaaaaaaaaaaaaaaaaaaaaaagtgtttaatattaggggttatttggtttaggtggagtttttattaattatggggttttttgtgttgtggttttaaggtgggtagttgatggtttttgtttgagttaatatgagttgtagtttaattataggggatggtgattttagggagtagagtttaggttttggttatagttgtatttaggagttagttgttttttagatttgtagagttaggggagaggtttggaggattggtattgaatgatatgatttaaagtgtgttaagttgggttggaggtgatggtagagttatagtggttatagagtttttatgtgaatttatatggatttgtttggtttaggttttgttgaattttagggtgaggaggatttggtttttatttttaaagatatgaagaggttgataaagaagagttataggtaaaagggggtggtgggtgtgttgtgtaggaggggttgtaattggatgtagaagattttagaaggggtaattagagagaggtagtatttttagaagatgggttgtttggttgttttaaatagtttagggtgtgattgaggggatttttggatttagttggggttttttttgttttgagataatgtattgggaaattttattaagtttatttaagaatttgaaaagttttttggaaatttagtgggtagggtgggtttttgggaggatttttggtatattgtgagagttagatatagtgagggggttttatatttttgtttagaagttttatggtagaggggtagaagtttagggaggagtaggtgttgagattagaggggtttataagagaggggtttggggtagggggtagttgttgagaagtttaggaaatggtgtttgtttttggggaagtgaagttttgggaatagggttggtgaaggggggtgggaagggggaggtgggggtggagggttaggttagattaggtattttttttagtagtagatttatgagtttttggaatttgtttatagaagtgataagtgttttgtttttagttttgtttatatatttatttattaagtgtggtagggatagttgttttttattatttattttgggatttggatttaagtggaggtttttggaggggtagatttaggggaaagggtttttttagaagtagttgttatttagaggatttgagatgagaattttattatgtttttattagatagaggagatttgtggtgtttttgagtttggttttttattttttatttagtagtgttttttttgtttattttaagtttagaatattttgttttttttaagattagttgttgtagtggattgaatagtgatttttaaaagatatgttagagttttagtttttggatttgtgaatgtgataggagttggaatagggtttttgtagatgtaataaaggattttaagaggagagtattttggatttagggtgggttttaaatgtaatgataagtatttttatgagatatagagatatagagaaaaggttatgtgaagatggagtagggagtggtgtgatgtatttatatgtttaggagtatttgggagttattagaagttgggagagaggtttgggttggagttttttgtagaggttttaaaggattagtttggttgatattttgattttggatttttggtttttagaattatttttagtttttaaagtttgtggggttttgttgtagtagttttagtaaattgttatgggggttttttttttttgttaagtttggtatttaaagttttttagttatttggggttaattatattgattttgggatttttaggttatttgtgtgttttatttttttgtttaatttttagtgtttgtgtggttatagttttttttttgtgatatgagttttttgggtttttgagtgtttatttgttttgtattgaaggttgaagttaaattttggagagaattgattttttttgtgggtagggtaggtattgtgtttttagtatagttagagggtattggttgaaatgtgtttttgtaaagtgttttttttatgtttgtattttttttttaagtggggaagttagagaggtttttttgattttttttttagttttttggggtaggaagtttgtggttatttgtttgtaaggattaggtggatagataattagttttttttaggttatattttattaatagagggttttttaattttgttggtggtttatgagagaaggaaaaattgaaggagttgtttatagtaaattttaaatttttgtgttagagaggtttatggttgagtaaggtatttttatttttattgttttgagttgttaatttagtttagtttagtattgtgatttttgatttgtttgtgggttatgggagtttggtttgttaattagtattttttagatatttattttgtgaagtttttagtggttgagtgtttttttgttttttttggatagtgtgggttataggggatattgggtaggaagatagttaagtttttattgtttagaaattgtttgggtttattgtagtaatagggatttatttattagtatgaggtttttttgtaggaggggtgggggtaggagggagtttgtggggtatagggttgtaggaggagttatttttttttttattaaattgtaggttttagttaagttatttttagtatggttgtttgtgtgggaagtttatagttgagggattgtttgtatgtggtatgtaggagttataagtgttatttatattttattttgggttaggtagatgatttttttggttttagttttttgatgaggaataggaagggttggattgaaagattttttttagtttggatatggaatgattttatgagggttatggtgaggtttgttttagttttgtatattagtttgggttagtagtttttaaaggtatagttgtaggggttttggagtagggataaggaggattagtttattttatttttttgggtagaggttaaggattttgtttttggtttatattttttgtggttaaaaatgtagaagtaagtagtgttggtagaggtatttagatttttgggtaaagtaggggttttatttgatattttaggtttggagtatgagaaaattagtttaggttttaggttttttgattgttagtgattagggaatgtgatattttttggtttttgtttttttattttttaattttagggggagattaggttgggtgatgtgtttttttttttgatagtaaatttttatttatttttatttttatttttgttttaagagggggttttttatggttgggtgtagtggtttatgtttgtaattttggaattttgggaggttgagatggatggattatttgaggataggagtttgagattagtttggttaatatggtgaaattttgtttttattaaaaaatatgtgagttggtaattttaagtttttagtagtttttgaatggaggttttttttttgtaggatttttaaattttataaatatgagtgtttgtaatttagttatttaggaggttgaggtatgagaattatttgaatttgggaggtagaggttgtagtgaattaagaatgtgttattgttattttagtttgggatatagtgaaattttgttaaaaaaaaaaaaaaaaaaaggtgggggtttttttatgttgtttaggttggttttaaatttttgggtttaaggaatttttttgttttagttttttagagtgttgggattatgggtatgagtttatgaattttaaaaaataatatttattgttttgtttttgattgtaaaaggaatttaggtataaagttgaaaatttgtaaaatgtataaaaataaagggaaaaaatttataaatttataatttaggtaatttttattaatattttgataaatgtttttttattttttattggggagtgtgtgtgtgtgtgtgtgtgtgtgtgtgtgtgtgtgtgtgtgtgtttaaataggtttatatagtgatgatgttgggtgtttttttttatgtggtgttatgtggttgaggtttttatatattttgggtttgtttttttgatttttttgtagttttgatgttttgattttagatatgttatttttggtttggattgtttaggagaattatttttggattttgttaaaaaatggattgttggtttttaatttttggtggttttggtttaggagggttgggtaagtttgggtattttggagtgtttttggggtgttgtaggtgtgaatttttgtttttttgaagatttataagttttattttttttatttttttttttttttttgagaattttataagaggaaagtttttatttggaggttgttagggatttggagttgttagtttatagttttattttgtttttatttttttgggagttatttaaggataatgtttagttttagttgttaagttttagttttagggttagttatatattgaaggatatgtagaagttgttgtgtgttgggtattgttgaggataaaggtttgaatgataagtgggaataaagttataaggttttaaaatttgtttgaggttttatagttagggttttggaaatttatgaaaaaagttagtttaatattttgttatggaatataggtaggagagggagtagtttttagttagtttttagttagttttttgttagtttttttgtgaattattttattttgggttatagttagggtagttgttgtttttttttttgtttgatagtttttgagggtaggagttagtttgtttattattgttttttttttattagggtttggtattttgtttggtatgtagtagaagtttaagaagggtttattgtgtttattttgtaatagttaatgtgtatgagtgtttattatatttgaagatagtgatttatttttgtttttattgtatagatgggaaattgaggtattgagaggttgatgatttttttatattgttgtgtgggtaagggtaaggttagatgtgagttggtatgttgggttattgtgttttttgtttatattttgttttgggtttgggaaggttatttttggagatttttatgatgttgatattttgtttagtttttttgtgtatttttttttatgttttttagttatttaaagtattagttaggtagtattgttattttggttttgtaaatttagttattgagtggaagagtagttaggttgaagtggggtagaggtagtttttgttagattttagggttgggatttttagttatttttattttttaaggattagtagatagagatttttattgtgtttagttaggggttagggaataggtttttatagtgggggagtgatggatggatgtaggtgtggattgggaggatttgggttggttttttagtgttggagttttagtagtttaatttattttgttgggtttttgtggggattaaaagatattttgtatataaagtattagtttagggtttggtatttaggaggtgtttaattaaaggaaatggttatgaaaaataataaggagaagtttagttataggaggtgtttgtgggtaaggagagaatagttggaagggtttggatttgggttagagataaagaatgtaagagggagggagggagagaaggagggagggagagaaagagggagggaaagaaagagggagggagagagggagggtagggtaggtaatagttggttttagggtagttgtgtgtaggagtttgttttattatttaaatattaggagagatgtaaatatttgagtgaggtttttttagtttggttttgttgtggttatagttagggttggagaaagagttttttttttattagggtttttgttttgtgttttttattttagttgttttaagattttatgtttttgggttaggagtaggggtttgagagtagtaattaggtagggtagtggggttagggagggattttgtttttgtttttattttttttttttgtttttgtttttatttttttttttttgtatagtattgggtttgtaaaggtgtgaatgaaggatttttttttttatttgattttaaggggtttaggtggttaagggttttttttgtagtttagaaaaaaaagtaaagtagttttttttgaggttttttggtggaggtttagggtttaaagtttgttgttataaatttgtagttttttttgtttttttaatagtgttttttttttatttgggttattttattattttggttttttttagttttttaggttttttggggaggaggatagatgtagagtttggattttgtgtgtagtagggtttttttaatgttgtggtgtattttgtttggttgtgggagtttgttttatgttatgatttgtgttggtattaatagtttttttttttattttttatttgagtgttgagggtagttgtgttaggtatagatatatagttttttatatatattatgagtttgtagaaatggtaagagaaggttgagtgtagtggtttatatttgtaattttagtattttgggaagttaaggtgggtggattatttgaggtaaggagtttgagattagtttggttaataggatgaaattttgtttttattaaaaatataaaaaattagttgggtgtggtggtgtgtgtttggagttttagttatttaggaggttgaggtaggagaattgtttgaatttaggaggtggaggatgtagtgagttgagattatgttattgtattgtagtttgggtaataagagtgaaattttgttttaaaaaaaaagaaagaaagaaaaagaaaaaaagaaaaggaaaatggtaagagaagttggttagtattatttgtttggtaaatttttattttggtttttggttaggaagtttttttttaggaagtttttttgttttatttttttttttgagtttatgtttagatttttagtgtttagaatagagttggtttttggggtatttatggatggttgttggataaataaataagttaattgttttttttatttttagtgatgtttttggtttggtagggtatttagtagtaatgttttttgagtggattttaaggagtattttttattgtgtagtttgtattagggattttagttttttattttaaattaaaggaaaaaatttaattttagtaaatatatagagtattttattttttgatttttaatggggggtaagaggtagaggatagaggagaagattatttttttaggtttggtttggagttaaaaagatttgtatgtttttattgtagataatattggtttttgggggatatagggtaggggtttggtttgttttttgtagggaaattgtttatttatgtggaaagtggggttaagggtttttgtttggaattagttttttgtatatggggtggggggtggggatagaaggagattttgtttggattgtatggaaatttattagattgttggttgttgatttggtaggagtagagttatttttattttttagggttttgtttgggggaggggagaggttaggtggttttgtttaggttatattttttatggttaggaatgttttttttttattagaaagaaagatgagataggtttattttgaattttttggatataggaagggggtttatttgtggtttaggtggtttttttttttatatttaaggggttttataaggaggtgttaggatttttaggttttgttttagggaattgttgtttgtaaaggttataggtagagatagttaggaatgttttttatgttattggttatgggttggaggttgtgaaattaggtatagaattagaaagatttgttataggttgtaaagggttttagagagttttagttttttagaggggtagtattgtagaaggggtgagaaggaaaaattagtttttaggaattgtttatttagagtttatataatatttaggtggtatgagataatggtttattttttattttatttttttgttgttttttaagatttgagtttttgggggtgtttttagtagatagggggatgtggggtaattgtttttttttaattgtatatttggaggtaatttatatttagatgatttttttgaggttgtgattagagtttggggtaggggaggggaagtgggtggatgggaaggtgagggagatttttttaggaaagttgttttaggtgtttgtaaggttttattgtttatatttaaggtataggtttttggttttgaggatataggaaatttgatgttatgtggggaggagggtattgtaatgtatttaaggttaggttttttgattttttggatattggataaatgatggtttttttagttggtttagagatgttaggagtgatagaatgttaaaggttgtagggggatatttagaaatttttgagaaagaagatggataaggaaaaataaaaaaatatgagaagtttagtagagtttgagttttgtatttttggttttttttatggttatgggtaattttttggagatttagttatgggagtagtggaggtaggtatgggtgggggggggggtgggttttattgtttatggttttggttgatattgaggttatttttttgtttttttaagtttttgggtattggtaggatttttaaaaatgataataaatttgaagtttttagaattgtttgttggtttagtttaaatggagttttggggttttgtagattaaattaaatagtttgagtttagaaatgttttaggtgtttgggggtgtttaggggttaattggtgggtttgtttggttggagagatgataaatttttttatttttgggattgtgttttagagagttttggattttttggttttataagtaatttagagtttttaaatttgggaaaaattaagagggttttggaaagaaaggtagtgtttgattatttttttttagtggttttgttaagggagagtataggaatttggtttttggttgggtttttgggatgaattaaaataaaaagaaaaagttgggggagggggtggtggaattgtttggggttttagtttaggttatatattaaggagattttagaggagtaggttagttttatttttggtatgatgatggatgggtatttggttggttggtaaagggaagagatggtaatagtgaggttttgaatttagtggttaagatttatttttgagtgtgattttttttgatgtttgggtatgtaagaaatgggaggtggagaaaggaggaggagattttagttttgtttttttggtattaggttattagggaatagtattttttttttaatgggtaggtagaggttataggttgttaggttgagaagtttttggtttttatagataaatgtatagtttgtatatttgtattattttgggtgatgtttattatgtatggttattatgtatgttttttattattaagatagttgatgagattaggtggttattgtgtattgggtattgtggtgattgtttgatattgatttttgggggtttaggtttttggtgggtttgtttttttaggtatttagttttttttttattttttgatattttgggtttagtgtaggggtatgggggtgtttagtggatgggtttatgggttgggtaagtagtatgtagttttggtttattagtttttggttttattattagataagatgagattgttttagttgttagtttagttttgtattatatttgattgggtttttgtagaggtttgttggatgagaatgtttagggtagtaggtattattttttgggatgtatattttgttataattgttttttagggaaaggttagtttgtagagttgaatgtaggttgttagtgtttttgttgtttttatggtttggttatttagtaagtgtttattttattgttagtgtttggttttgtagatgggtatatggtttatttatttgtgatattttagggtgggggtgggggtagatggtggtagggaagattaggataattttttagtaagaggaatttgtagttaatatgatgttagtttttagaatgttagttaggtaggaaaaggggggttttatggttgtattgggagtttgagtatttgttgggtttagagggatttttaggtgggtgttattggtattagtgtttgttgtgttttttataattagtggtgattatgttgtttggttttatttatatagtggtattatataggtttttgtttgagattttttatttttagatttgtatatttaagtatttaaatttatttgttttttgtaaatgttttttttttttgtttagatgttatattagttgtgatatttattatatttgtaggaggtaggatttgtgtttagtgttatgggttgtattttagagttttttagtaatttttaaagagagttgtttttaattttattttgtaggtagggaaataggtgaagaaattgaagaaattgaagttgtttagttttttaatggtagagtgagggtggtttgggtatttttatattgttatattttttatttttttaaagtattgtttttttggatgtaaattttgtttattagttttatttaaaatttttttggatagttatagtttatagaaagtatttttagtttgtagttatttagttattgtaggggtgttttggtgtttatttttatttgtttttttttggatatttagtttagagaatttatagttttgttgtaaggttgattatagtgtatttgttgtttgggtgttgtgtttgtttttttttaaatgaattaatttgtagttgggatagtgggtttgtttggttttgggttttgaatttaaagagtattaagttagtgttgttagtggttgtgggatttgtgtaagaggtttgtttttattttttatggtttttgttttttattataaaagtttaaattgtagagaggtagtatttataggatgttttgagttttggttgaaaggtagggtttattatgtaagaggtttattggtattaattagggataggtttgtatttattattaagtaatggggtttttttttttagagaggaaagaggtatttgaattttgttagtgtgttagtttttatgttttggaggtgttgggatttttagataagaaggtatatttatatggttttttttatttagaagtttgttttatagtttgttttgtttttagaatatagatttgggggttttttttgggtgatagtgggggtttgggagaagtttagatgttatatagttttgggatttgagtatgtgggttttgggttagattgttttaataaatattaaggatttttggatttttttttggtgtgtaaatttggttatagtaaatattgttgagtaaagtaggttaatagttggtatttggaaaggtttttgttatataaagatttgagttgtaattgtgtttgtgataatagatttggtttgaatttatgaaagtatatgttgtttgttagttttgtgtttttattaattagaagggagaaagaggaaagggttattttttttgttattttattatgggtagtggtgggtgttgtagttgtttggaggtttgtttgtatagtggaaaagtagaaaatgagattttaaaaattttattagttaaatataaaatattttttttgttgttatgtggtggtttttatagagttttaaaattttgaagtttggagatttattttgaagggggagtaaaggtgggatgtgggaagtttgagtttatggaagatattgatattttttttatttttgggaattttgagtttgaaggatttggtttgaatagtggaaggattgaatttttgtgtaatttattggtgatggaatataaagttatggtgtttttggtttttaagatgggagggatggggaaggttttgggtgaaggggataggtggggaaggaaaaggtgaagagaaaggtgttttttagggagggggtagatgtgtttaggatatgggatattggtagaattttaattttgagtatatatataggtttatggatggttttttgtttatttgttttttatgggtgtgttgtgttggtttgggtatttgtttttttttttatgttaggttatttgttgtttattttgtatattgttattagttttaagttttttagaatattttgattagggttttgtggtttttgttataggattttaggtttagatgtttgtttgattggaaaattgtttttagagatgttgtggtttagagtttgttttgttttggggtggtttttggagtttttgttttttagtaatttatatggtgataggtatttatatttgttggttttaggaattttggggttattattttagtgttgtaaggagttggtagttttttttttatttttttggtttattttgtaggaattaagatattaggtgagttgttttgggaaagagatttgtgtttttatggtgttgtttttgtgtttatttttagttattttagatgttttttgtggattagttgtatttttggtgggtatgtttggttttttgtagtttggtttatatgatttttataggtaggtttttttttatgttttagttttttttttagttagtttattttagttttttttattgttgttggttgttgttggttagaaggttttttttttttttgtaatttaatttttatttttttttaaggtttgttttttttatattgattttttttttgttagttagtggtgatttttttttattttgatttggaagttgtttgtttatattatttttggttgggttgaattatatttttttttttattttttttaattattttttttttatgtttgtttgtttatttaaggttgtttaatttttatatatatatttttatattttttaattatattttaggttttttgggtattagggagggttatttttttatattttaggttagtttttatgtatatgtgtatttatgtatatatatatttttttatgtttattgatttgggttatttgatggttttaagattagaatttttagtaaaattatttaggatatataagggggagattgataaatatagggaattagtagattgaggttttattttttgagattgagaaatttttttttagagttaaaggattgttaattgttgtattaggatggttttaatgagtttattgttttggattaaattatagggttataaaattggtttgggagatagttgtagaagtagttttagatggaggtatatgggggtaagggtggagttatatttagagatttaaggaaggggtattaataatttttatagtgtaaatggtgatagttgtataatgaatataattttaaattttggtttttttttttgttatagggtttttgttgagatatgagagtttttttttagaaattttattgggggtttgatattttttgttaggaattgagagtagagattttgattttgtaggtaggaggagagttttgtataatatagggtttttttttataagggtttattggaaagtggttagattggttaagttgtgttatttggatatttgggataaggaaggtttttggaggagtggttgtagggaggagttgtaaagaggtaggggtagggaggttatatttatttggggattgtaggaggtttaatggaatatagtggatttagggagattttagtatgagtatgtgtttaaagatgtttagatgaggaggtgttgtgggggaggggggtgggaatagtaagtttttttagttttgtagatttagattttttttttttttgggaagtagggatgtaaagggatagagtttgaaaaagggtttttattattaagttgataaagtaattatgatgtttttagtttatattttgtatagtgttagtggttattggattataatttttttttgtttttttgttgttttatattttttttaggtttagttttgaagaatagttattggtattttgtttggtgtttagttaaagttttggttttttaggaggttttgttttttttatttagatagggttgattttaggtgggttgtgtgggtagttgggtttaggatatttagatgttagttttggttttggttatggagtggggaggattttaggttggttattttttagtttggtttgatatttggatagtttgtttattttaatatagttttttttttttttggtttattagagggttttgtttaagttagtttaggagtttttttgaggggtgggggttttaggttttggtagaggtaggtttgttttttagaagttttgttttagagtgttggagattattgtgtgagttttttttttgtttgttgtatttatttttgtggatgtaggatgtagagttttagtattggtagttaagaggatgtaggaaagtgtatgtatttataggtttagagatgtggatgttagatttaggtttggatagagtagttttgtaagttttaatatattttgtaaattttgaagataggagagagttaaaatattttttttgtttgtatgtaggttttttttgttttttatggtttgattttgggaggtggatgaggatatttttaggtttggatgggggttatgggatattttattttagattttgttatgatttgggttgtgtttgtttggtgtttttggtttatgggttgtataatttggtggttttgaaattggtgtgggggaggggagggttgtttatttgagtaggatgtggttgtttatttagttggaggtgaggaatgatttttttattttgttgttgggtttaagtggggtttgagagttgttggggagagttaaagggaggggattgatggattttttagagtgaaattgtgtgttttggagagttttgaggtagttttgtgagtttttgaggaggttgttgttgtttggtaaatataaataataataaaaggaaggaaatttaggtggtagtgtgtagaatgagtatagggttttgtgagggtgtgtagggtttatgtgggtgtttttaatagggttttttatgtaggtggtgtgggtatggggttgggggtgtgtggtgtttttagtgggagggtgtttggattaggggttttgtttttttttagtgtatttttgtttttttttagtgtatttttgttttgtgttaggtttatttgtagggttttttttagtatgtttgtggttgtagtagttagtttagtatttatttttgaagtttgaaatgattttatttagttgtgtgttgattgtggggtttgatatgatggttggtgggtagtgggttgtgtggagggtagtggtgaggaagtgtttttggtggggtttgggttttgtgtgttggttggggtgttgtgtttgtgtttttgtagtgtagagttagttgttggaggagtttttaggttttttggtttagttgaatgaatgggggaggaaggtgggtgttggtttttttttgtgtgttgtgtttttgttttgtttttgttttttgggtggattaggtttttgtatttgtattggtttttttgttttgtattggttgttttgtttgtttgttaaggttaggtttggggggttggggtttgagtggttgttgggggatagttttgggtatatgattggagtgttttttttttttttgtttggtttgtgtttaggggatggtgagagatgtggttttagtttttttttttgggtgttttgttgtggttagatgtgggtggatgtggaggttgggttatggtgaggagggtgggtgtttagaggggaagagatttttttttttttttgggtgtagggtttttttgtaggaggttgtatttgggtagttaaataaagttttttgttattgttgttgtgtgttttgtgtttgtaagggttaaatggtagtgtatgtggttggtaggtaggattttggtttgtgggtttaagagttgaggggtgtagggtgaatatgtgagttttatggtattagtgagaggttattaatttttatttattgagggtatttttgtagttaatatttttattatgattattgttttgggggttattgttgtatttttttgggtgagttttggagaaggtattgtttgggagaaggggtatagggtggggatggaatatggttgttagagaagttagggatgggtgatgtttttttttttttataataagggttttttgagagtaggaagtagattttgttaggagtagatgtttttgaaggaaggtgtgaaggaaggagttaggtagtgagtgagtagaaagggagttgttttaagggttttttttttttttttgggttttaatttgaggtttagttttttttttaggttagtggtttttatttttaaattatattatttataaggtaggtagggttgaggggttggggtagatttggggatttgggttagatatagaatttgagaagtaataggtttttatttttaagaagggttttttaggtttgttatttataagagagagaggtgttttttttatttgttttggaaagttagaaatttatttttgtatgttttttttgttattttgttttttagatttttggtttttgtttagagttaggggttatgtgagaatttatagtatggaataatatttttatttttgaagtagtaggttgtaatgttataattgtattttggttttttgaatgtgtggttggggagtgtttgatagtttattttgggtttgaggttgtttgttgtttatttgtttttttttattttttttgaaatattttaaatgtgtaggagtgttgagattttttagttattttggagaggtggggggtagggggttttttgtggaaaatgttttaggtttgggtggttttttaagtagatgaaattaagttttttttttttaagaaaagtaggtatttttttttttatgttttggatattttgaattatttttaattaagtgagtttgtggatatgggaattgtaaaattatagatattttagatgtgtgtatatttttgttggtttgggagtttgggttttagaaatgtagttattgttgttattaatagtattttgtattttttatgttaggttagggtatgttttgtttgaattttagtatttgggtttattggatagtttagtttttattgggttatttgtttatgttgtatttggggatttgggggtttagtatttaagaaatttagtttaataatatagtttttttgggaagatgttgggtttggtataatagttattttaagttatagtattatttttgagtgtttttttaaaaagtatttggtgagtgtggatatatttatgtaattgtttttttttagggttggtatggagttttattagattagtatagggttagttaattgtatattttttatttttatgtatagtgtagtaaatatatttagttttttggggagtgttgttagggtgtatgttttattaaaatgggaatttaagggataatggtaggagagtagttagaaagtgtgtatgtttttgtgattgtgtttagagtttattggttttagttttagttattgtttttttaatgtaattatttagagttatatgattaggtttagaaatttttaggtaaggaggttttttgagtttttttaggaaatttaaattagggtttggttatatttttagttaggaagtttatttttgtatttaattaattgttttaattgtatattatttattttttttttttttttgtttttagaggagatgggaaatagttgggtattattttttaagttataattattttttttatatttaaggataatttagttgttttttggtttttttttttttagtttaaattatttttttttagttttttaattatattttgagttgttttttgattatagttaagggttgggtttagtttggggttttaggattttaatgaggttttattgttataggatagtgaggaggttttttattttttttttttagggttttagggtttggatatatagttttagaaggggtattgggtagagaagatgtatgttggtagtagagaggaaattgagttgaaatttggtaagaataaaagaattataaaggtttgtgtatttagtaaggtgtatttttttatggttataaaagaaggtaagattgattgtaggtttggttaaagggattgtttgtgtttttagtgtataatgagatttatagtgggttggtgattttttttaaaataaagatatgtttatttggaattttaaatgtgatttgattttgtttaagggtttttgtagaaagaatttaggtaaggattttaagataaggtgggttttaaatttaatgttgtgtttttttaagagatagaaaagaaagtatagagatatagaaaaaggttttgtgaagatagaggtagagattggagtgatgtagttataggttaaggaatatttggggttattagaagttggaagaggtaaagaaaggtttttttttggagtttttagaggaagttggttttgttggtattttgattttagatttttggtttttagaattgtgagaggatatattttttttgttataagttatttagttttgatagttgttatagtagttaggagaaatttgtgttttatttttatttgtattatgttttgaggttaaagttttatatagtaaagatgtttaagtaattataaattttgtgggtagtttatttgtttagtagattattgttttaagggaagggggatggggatagggaagagagttataggaaatttttgtatgtttttttggaaatgggaaggagtaggtttggagagaaattttataggttaggttttggggaaatgaagtttataaagtgtgggaatggagtggggaggaaatttatgaggaagtagtgtttggtgtatatatttatatttatgatttttttttaggtatagtttttatggagaggtttagttggtagggaagtaaaagaggtttggagagtgaaggaaggtgaggggtttttttttagtaatattgaggttttagatgggatattttattaggtggtaggttgtgtttttatagatagagattttttaagggtagggtttagatggttttatttttgtgtggtttgatataaagtaggttttttagagttgttgagttttgggtttgttagtggtagagttttttatagttttttaagtttttatagttttttattttaggaaatggtgttattatttatttagttgtttaagttaagtttttgggtattattgttgattttttttttttttttatttttagtatttaaattatggtgtgtttttatttttagtttttttgtgaattagtttgaattttttttttttagtagtgtgttagttaatggttaataattggttatttggggttagtaaaagtaataatatttagttttttgatttgtagtgtttgtttatttttgtggtgttaatatttttgttttggttaattttttttttttttttttttttttgatagggttttattttgttatttggtttggagtgtagtggggtaattttggtttattgtaaattttattttttaggtttaagtgatttttttgttttagttttttaagtagtttggattataggtatttgttattatttttggttaatttttgtatttttattagagatgaggatttattttgttggttaggttggttttgaatttagatgatttgtttgttttggttttttaaagtgttgggattataggtatgagttattgtgtttagttggttaattttaagttatttgtatgatattattggaggtgagattgagaagagatgtttagttattatgaatatagtgtttttattatataaatataattttaagaatataattgtaataggatagataatagttaaatgttgtaaaaaatttaagaggtgatgaaagttgtgtatttattattttttgttttaaatataattatttataagtaattttttaatgttttgtttaattttttttttataatttgtaatttaatttatattgtaaaaatttattatttttttaatagagtaatgtatttttattgtgataaaatatatgtaatataaaatttattatttttggttagttattatggtttatgtttgtaattttagtattttggaaggttaaggtgggtggattatttgaggttaggagtttaagattagtttggttaatatggtgaaattttgtttttattaaaaatataaaaattagttgggtgtggtggtaaatgtttataattttagttttttgggaggttgaggtatgagaattgtttgaatttgggaggtggaggttatagtgagttaagattatgttagtgtattttagtttgggtgatagagtgagattttgttttaaaaaaaaaaaaaataaaaataaaaaagataaatttattattttaattaagtttttatgttagtgatattaagtatatttatattgtatatttattaatattatttatttttgaaattttttttaattttttaaattgaaattttgtttttattaaataataattttttattttttttttttttagttgttggtaattgttattttaatttttttatgaatttgattttatataagtgaaattatataatatttgtttttgtgagataggtttatgtagtatgaggtttttaaggtttattatttaaggtttatatgtagtgatagaattttgttttttttgaaggttgaatgatattttattgtgtgtatatatattttgtatatttattttttttatatttgagtaattgagagtaaagttgttataaatatgggtgtgtaaatatttgtttaagtttttgtttttattattttattattattattttatttattattagtattattattattttagatagttttattttgttgtttgggttgtagtgtagtggtgtgattttggtttattgtaatttttgttttttagattggagtaatttttttgttttagttttttgagtagttgggattataggtatttgttattatgtttggttaatttttgtttttttagtagagatggggttttattgtgttggttagggtagttttgaatttttggttttaagtgatttattttttttagttttttaaagtgttgggattatagatgtgagttattgtgtttagttattattttagttttaaatattatagtaatttttttattgttttatgagattttttgagatagtggttttagggattttatatatatttgtttgattttgtgtaatgataaagtgtagttttttttgtagaatggtagagttgggagatttttgatggggtatgagtttaaaggggtagaggggatgtttagaatatatatggattttttatgtgtgttttgttagttattaagtagatttgttttagttttgatatgtttaggattatagatagtgtatggtttttatttgggttaagtttttggaattttttttttttttatattatttgtattgggagtagttattaggttgtggattattaagttttttttaggttatttgagtttgtatttttttatttagtttgattgagttggtgtgtagttattatattttattatattttttgtttggttgttttaatgtaattataaggttttatttaaagaagtatatgattaatttgttttttagattttttagtgatttttttagtttgttttgtgtagaatatttatagtaaaatttgattatagtggtttgagtttttatttttaaggtaggggattttttaaataaagtattagtgttttaaatttatgattttttaaggaggtttttggtttttagtatagtaaatgttttgttttatggttttttggttttttatttttattttatttgagttttttgttttggtatttgggattgaattagtttggagttttttagttttgttgtttgttggttttgatgatattattagggattgtagtattgtttggattttttgttgttatattttattgtaataatatttaatttgatggaattttgggagtaagtggtaggggtagggatggtggtggttaggggttgtatatatataggatagaaggattgaaggattgggtggaaagtatgatttttttaagatgatttttttttagtagaattttggttgtgttttttgaatagtatttgtttatttgtatatttggtgagttttgtgattagtaaatttagatgtttgggaggttattagtggttttgttgaggtataatttagatatgatagtttatgttttttttttgatttttttttttttatatagttttatgattagagtgttttttttatttttgtttttattttagttttgtaagatatagttgtgaaatggttaaagtttttaattttttagtatttgtttgagattggagtataaaaatgagatggggatatagtattttatggatattagtgatggaaaaaaattttttgatttttttgggagttttgtaaagttatattaggggataagaaggagtggttagtttggtattgatttagttttaaagtagttagtgattaaagtatatagttggtatttttttatttttagggtattaggaggtttggttagaatttatgttagttaggagaaataggttgtttttggggtttttggtgttttggtttttttattgtttttttgaagaaggtattttgttttgtggggtttgaggttggaggtaatttgttattgatgtagtgtagggatgagggttgagttattagtttgttttagttttatgttagtaggaataatagggatttaagtagagaagaaagtatttatttttaaagttattatagtgattgaggtgatgtggtttttagggagtttttttttttgttggttttttgtggattgtggttttatgttttaataatgtttttgtttattttgtaaggtttagtaggtggaaggaaagagggtggaggttgggagtggtggtttggtaatttgggaagggtagggagtaggaatatgtttttttttttttgtatttgtttagaaggttttatagggtttgttttgttatttataattttagggagatttttttttaatgtttgttttataaatgtttatttattttatatttgaatatttttagttatagggagtttagtatttatttatgttatttattttatttttggttgtttaaaaaagaggaaagagagagaaagaaaagataggaaagatagagaaagggggaaagagagagagaggaaagaaagaaagaggaaagaataagataggaaggaaagaaaaaggaagggaatggaagggaaggaagagagggaagaaagagagaaagagagagaaagaggtataaataaggtaggttttatggagtagagatttaataagggagtaaaatatatttgtagttaggttgtagatggatttttataggagtgtatatttattttattttttttggaatagaaaagtggaaagaagatgtagtggtgtgggtgggtggtggttttttttgggggtttggaatgtggggtattagtttttttggttttgagaaggagattaagattattaatatttatagtggagattgaattatataagggttggggatattgttttttttgtatttttaataaagatttgatgttttaattatgggaatttgtggaagaagaaataaaattggttttggggttttttagagaattggttttttatttagtggtggttgtgaagaaatttttggagttagttttagtggtttgggtttgtatagttgagattgtttttggaagttgagtggaagtggggagtttttaggtatagttgggttttgttttttattttagttagtagttttaggatttttgggtgttttagagttttttttagagggtaaatttagagtatgagggagtggggagatgtttaatattgggggatttttgtttgtttttgtttttagttttgttgatttgaatagggaggttatgggtgtttaggggtagaattgtgggttggtaagtttttagttttggtttttttttgtttttttttttttattgttattgattatttttggttatatgttgatatttttataggatgatggagaagagagaagaggaatttttttgttttgtttagtatattttaaagaggttttagtgtaaaggtattgatgtttatagttaaatgtgtgtgggggttttttaggagtgggatgtttttattttgttttagattgttatgaattgatagaaggttttatgttattaaatatattttattaataaattattttaatatttagtaaaaaaataaataaaaatgtatgtattttgtgttttgtagtgtttttatgttgtatttttttttgtatttgagttttggtttgtgtttttggtttgttgttttgggaatagaatgttttgtgtgggaggtagataggaagtgtggggtgtgttggttgggtttttttagataatttggtattgttttttttagataatgaaattttttttattttgagtgtttttggaagttagttggtagttagattaatttaaatgaattatttgttttttttgtgaagtgattttagggatttaatgggtttgttattaatatagttttttttgtattttgttttttttttttatttttttttttttgtatgagttattggttatgatgatttggtttagttaagggatttggttagttttggttaggttatgtgagagatagtataaaggattaaggttgttggaattaggttagaggttgagggttatatggattttttggagtgtttgtaattggggatttttaaggttgttttttggttttggggatttgtttatttggggatagttttaagggagatttttaaaagtagggagttaaaagggtgaattaatatagaaatattgagggttagggagaatttgaagatgggtttggttgggtatagtggtttatgtttgtaattttagtattttgggaggttaaggtgggtggattatttgaggttaggaatttgagattagtttggttaatatggtgaaatattatttttattaaaaatataaaaattagttgggtgtggtggtaggtgtttgtaattttagttatttaggaggttgaggtaggaggattgtttgaatgtaggaggtagaggtggtagtgagttaagattatattattgtattttagtttgggtaatagagtgagattttattttaaaaaaaaaaaaaaaaaaaaaaaaaagataggtttaaggtttggagagttagaagttatttttttatttttgggtggtttattttgagattgtattatgttagagaaagttgtgggagtgtttgtttataatttataagtaatattgttttttttttttattagtttttggttttagtaggtttttgatttgtgttttttttagggttttgggtttttttaagttggatttttggttgttggtgggatgattatgtgatttgttatttttttgtttattgttttgggtagtttttgttatttggtgtatatagagtggagtttagtaaggttggggttgttgattttttgttagttatatttgtttttttttatgttatttttttttgttttggttatgtttaggggtttatatttttttataagttaggtgttagatttttgtgtttgttttattttgttttttttgtttggtgggttttttatattttttttggtttgatttaggtttgatttgtttttaggttttagtttagaggttgttttttttaggaagtttttttgggattgttagatgaagggatttttttttggattttttttttatttttatagttttaggaatagtttttaatttaggttttattgagttagtgtggtatttaggagagttataagtgtgtgatgaatgtgttgaagtttttttaaaagttgaaggagttttgtgaatatatagtagtattagtttagattgtgaaggtataggggagttagttttttttagttttgtttgtttttggttttttttttgaggaggtgggagttagttagttgggattaggaggtgggttttatggagtagagatttaataagggaataaaataaattagagaatttttttgttgtaaggaatttagataaggagtatttagttagaggaggaaggaagagattggtagtagattttttttgttttagtagttttgtaagttagatgggttaattttttagtatagttgttttttagtatagagaaattttttatttttagtaatagggtgggaatatttttagatagggttatggttattttggttatagggattatggagtttgagtttttgtggtttgttttatttatgtggttatagattttgagtatatatttggagttatagagtttaaagggtagggtagggtagggaatttgtttgattggtgaaggttattttattatttggagtataggtttttgtttttaaatttatatggagtttttgatatggggtattgattttaaggaggtgaatgtggatatttaaggttagtgaatggttaggtgttaatatattgataggtttttggttttttttttaatattgagggtaggaaataaatggggtttatatggtgtatatggtttttagagttagtaaggtgtgtaagatttggtagttgagaaaattgattatttggttgggtgtggtggtttatgtttgtaattttagtattttgggaggttgaggtgggtggattatgaggttaagagattgagattattttggttaatatggtgaaattttgtttttattaaaaatataaaaaattagttggatgtggtggtaggtgtttgtagttttagttattttggaggttgaggtgggagaatggtgtgaatttgggaggtggagtttgtagtgagttgagatagtgttattgtattttagtttgggtgaaagagtgagattttattttaaaaaaaaaaagaaaagaaaagaaaagaaaattgattatttgattatgaataagttagaatatttatttagaaaaaaaaaatagttttgtttaattggggatttaaaattttaggatttatgttttttttttatagagttatattatttttttaatgtttatttttgattttatttgtttgttaagttttaggtatttagaatatagtatgatagtaagttttgtgatttttataggtttttttaatttattttaggtatagttatatttttagttttgagtagtagggagtgatatgtagatggttatttagatagagaaagatttttaaaaggagggtaggttttgttttgtaggtagtatttattgatatagatattagtaggtaaattttttaggaagatttttattaagaaagaatgaaagaggtttagtgtggtggtttatgtttgtaattttagtattttgggaggttaaggtgggtggattattttaggtaaggagtttgatattagtttggttaatgtggtgaaattttatttttattaaaaatataaaatttagttggatgtggtggtgggtatttgtaattttagttatttgggaggttgaggtaggagaattatttgattttaggaggtagaggttgtagtgagttaggattatattattgtattttagtttggggggtaatagagagagattttgttttaaaaaaaaaaaaaaaaaaaaaaaggatgaaagataaataaggttgaaattggtaggttggtatatttttaataatttattttaggttgggtgtagtggtataatgttagtattttgggaggttgaggagggtagattgtgaggttaggagattgagattattttggttaatatggtgaaattttgtttttattaaaaatataaaaaattagttgggtgtggtggtgggtgtttgtagttttagttattttggaagtttaggtaggagaatggtgtgaattagggaggtggagtttgtagtgagtggagattgtattattttatgttagtttgggtgatagagtgagattttgttttaaaaaaaaaaagaaataaaaaataaaaataataaaaaaaaaataatttattttagtagggagtaggaggtaaggtttgatatgtagtgtttgttaatttttgtggtgtaaatatatttattgtggtaaattttaagttataaataggatattattaaatatagagttgggaaaagatatgtatattattggataaaatgtttaggtagttatggtttatttttttttgggaaggggggtatgtttagaatgttttttattatggagaatgattgtggtaaatagggtttaattggtaggttgatttaattaattgtttattgatgtgatgtggggtaggtttttgaggttgtttttatgtttagggaagaaggtggttatgtggttatagatttggttttgggtttgttttttttttttttttttgagatagagttttgttttttttttttaggttggagtgtaatggtgtgattttggtttattgtaatttttgttttttgggtttaagtaatttttttgttttagttttttaagtagttgggattataggtgtttattattatgtttagttaattttgtatttgtagtatagatggggttgttggttaggttagttttaaatttttgattttaggtgatttatttattttggttttttaaagtgttaggattataggtatgagttattgtgtttatttgggtttgttattttgaggatatatttggagttatgtgtttatgattttttttttattttaaaattttgattttattttattgtttttagagataggttttgttttgttatttaggttggagtgtagtggtgtaattatagtttattgtagttttgaatttttaggtttaagtgatttttttattttagttttttgagtagttggggttgggtttataggtgttattatatttagttatattttatatttttttgtagagatagggttttgtaatttgtttaaattggttttaaatttttggttttaagtaatttttttatttttagttttataaagtgttgggattatagatgttagttagtgtatttagtagttattatgattgattggtgatgtttgttttagttttaggatgaaagagtagtagtattttagttaagtatttgtggtttttgattggaagatgttttttttgttttttaagtatagtgtaaatgttatttttttggtaagtttttttttaattttattttttttttggtatagggtttgttatagttttgtttatataaagagagttattagtgtatgtggtatagatgttagttgtttttttaatatttgagtttttttttttttatagtaattgaagttttggttgtgtatagggaagtttagttgaagaatatattgtttagtttttttgatgataggagtggttatataattgggttttggttagtgggaaggagttgaagtgtttaatttttaggttatgtttttaaaaataaagagggatatttgttttttttttttttttttttttttttttttttggttggagtgtagatatgatggtaggagttggaattattttagtttaagagatggaagttgtgtgttgaggatgtattaaaggaatgaattaggtttgggttgttttgggtttttataatgattgatatttggattgggatgtgggtttgagtgttgtttagtttttgatgttttagtttttgttatatagttagatggtgttttgattaatttaaggtatggttattattttatttgtttggtagggtaggggttttatttttatatgttgagtttttggtagaatttggtgtaatatatatagttaaagtaaaatgaataggttattttaattaaggtttattttgtgggttggttttggtatttggttttaatttttattttattttatttatttattatttttgagatagagttttatatttgttgtttagtttagagaggagtggtgtgattttggtttattgtaatttttattttttaggtttaagtgatttttgtgttttagtagttgggtagttgggttttttttgagtagttgggattataggtgtatgttattatgtttggttaatttttgtattttttgtagagatggggttttattatgttggttaggttggttttgaatttttgattttaagtgatttatttgttttggttttttaaagtgttgggattataggtatgagttattgtgtttagttagttttggtatttggaattggaaaataatagtttgagttttagaggggataaatataaatatgaggtagaaggaatagtaagtaaatatgtgtttagagtaggttgggttgtttatatttttaaaatattgttaggtgttgaggtttgggttttgtgttagatttttgggtgtagattttgtggggatatttattgggtagtgggatttttggtaagttatattatttttttgagtttttgttgattaagttgtttattgagaataatatttagattgaaaggatttataataatatgtgaaaagtgtttggtttaaaataggagtttggtaattggtagtttttattatttataatatatagtttaatgtttttgttttataggaatgaaaataggatttagataggtaaaatgatttgttgagggttgtatagtgttaatgatagagttaggattagggtttggggttttgattttttttgtagtattttggttttgtgagaagtggttttgggtgaatataaggagtgaggagttggtgagaaattttgaaaatgaagttgggtgtggtggtggatgtttgtggttttagttatttaggaggttgaggtaggaggattgtttgagtttgggagttggaggttgtagtgtgttatgattgtattattgtattttagtttaggtgatttagtaagattttattttagaaaaggaaaggaaaggagaggggaggggaagggagggaatttttgatagtgattttagagataattaggatgatttgaaattattttgaaatgtattaaaaaataaaaataaaatggatttatggttaggtgaaggagggatagatggatggtgaggtgataaagtaggtgtagtttggtgttagtggtagaatttaggtgatggttgaatgtgttttttgtaaaatgtttttaatttgattatgtgttttgaatatttttataatagaatggagggaagagaaaggtaagagggagttattgtagttgttgtagtaggagtagattttaaaatattatgtattagatttttagttttgtttttgtggatgtgtttttgtttttttttttgggatttaaggatatttaatgagtgtatgtgtttttaagtttttttgtttttttatttgtttttatatttggaagattttataggtggtgtgggttagttttttattttgttttttgtgtttttagtgtatgatagatattgagtgagtgttagtttttttttttgatattttgtttgtttgtttagagaggtttttttatagtttagttattaggttgatgtttttggatgtttggttgatagtttttttagttgtgttttagtgatttggtaggtgttttgagttataaataaggttattagtggatgtttttaaagttttttttattatggtgttttttttttttttattaatagtttgttatgatagttagtttgtatgagtttttttttagggttgtgttttttgaggttgtttagtgtttggtttgttagagtttattagatagggtgtttattttttttaggtttgagtttttatttagagaattatttatagaaggataatggagaaaggtagttggggtattaaatggagtgtgtttgtatgtggggggggaggggagggggagggaaagtaggaagagaagatataagaggagaaataagaataagaggaaatatagaaggaggaggagtagttttttttatgggggtggattttgtgtttagttttttattaaggatattatatttattattttgtttggtttttatgaatatttttaaggttgtttttttttggtttttatttttttattaggaagtggaggtatagagtgagaaagagttgtttaaggtttttaggtagtttatggagttattgggagttatatttaatttgtttaattttatgtttttgtttttagttattataataaattattaaggttttatagttataggagtttagtttggagtttttattgggttttttaaggtagggagatggggttggaggttatgttaggtgtatggtgtttagagttgtttaggaagttttgtggtgtgggttgggtattaggtagtgtttgtaggatggagaaatgaatgaggttgagatatagtgttgttttttttaaatgtgattttttttgagtttttgtgattggttatttgagagggtagttttggttttttggtgtttatgtttgggtttagagatgttttttttagttaggtttttttttgaggatggaaatttagaattttattataggaggaagagttgggagtattttattttttttttttttttgagatggagttttgttttgttgtttaggttggagtgtagtgatgtgattttggtttattgtaagttttgttttttgggtttatgttatttttttgttttagttttttgagtagttgggattataggtatttgttattatgtttggttaattttttgtatttttagtagagatggggttttattgtgttagttaggatggttttgattttttgattttgtgatttgtttattttggttttttaaagtgttgggattataggtgtgagttattgtgtttggttagggagtatttttaagatttttgtggagggttgtttaggtttaagttttttattatggaaggttttttagatgtggtagttatggtgtatgggttgagggtttttatttattaagaagtaggagtatttgatgtatatttagtttatgatttttatttatttgggggttgtgtttgtagttatgtgatataagggaatagttatagtagtgggttataaagagagtgtgggttaatgtgtaggggtagaattttgatagttttttatgggttggtagtagggaggggtatatttgtataaattttatatgtatagttttttatatatatgtggttgataattatttatatatttaagatgggatttggtgtatagtttattagtaataggtgttggtaatttttagttgtttttttgttgtggtgtagatattatttaaggtgggatggagagagttattgtttttaaggttatatattttaaagggagatgttgggttatggaatgaaaataggaggattagttagagttattggttttgagttatataatgggatatataggtttatttattttatatttttattgagtaattataatgagttaagttgtatagattatttaaataattggtatgtagaaaagtattttaatttttttttggttttgatgtgatgggaagaatttggatttttggagttatagagttggatggaaattttggtttagttaattattggttgggggagtttgggtaagtgatttaaggtttttgagtttgtttttttgtaaaagagtagtgtttgggtttgttatgttaggttagggtaagatgattgaagagtaagtgtttagtattggttaggggttaatgtttttaaggatgtaaagtgtaataagtaggtgttatgattgtattgttttttattgtttgtggtaaatatataagtaaagatggttttgtgtttgtgttgggggaggtagggaattggttttaggaggatgttggtttttttagttgttttttttaaagttttttgggaggagaaatgatttattttagttgttgggagttttaatttataagtaggtttgtttatttggtagtggttgtatgtaggtaggaggggttttggtagtttttaagagtgaggggttgtttagtttttttttagttggaaaggaggttttaggttgggtaggagtatttggggaaatttagtttttggagttaggttatattagggagatgaggttgttagaagtttttttggtgtttatagtaaaatataattaaagtgggatttagattttaattagtttaaggtttgatttatattagagggaaattagtgtttgttgtatgagtgagtgtttatgtgtgtgtaaggtagagatagattttgggtaagtttttttatttttttatgtttgtttttttatttataaaatggggtaatattatttattttatagggttgttatgaaataaatatgtattaatatttgtaaagtgttgagaatagtatttggtataaaataagagtgatagatttgttaaataagtaaaaaataagatataagtttaaagtagagtttggtatattgtgagtattaagagttgtgttttttgattttttttttttgtggagatttttttattagaagtgggagggattgttgaggttggagttttgttttagggatttttgtggggagttttttagtttagagggatttgttttatggattatatttgttttgggtttttgtgtttttgtgtatgtgtgtatatatgtgtgtatatatatgtaatgtgtgtgtgtgtatttttatggatttgtgataatttgtatatatatgtttagaatttatttgatatagtgttttattaagatgttggagttttgatgaatggattgtggggttgagatattgtttttataggaagttgttttagtagtaagttttttggtttttatagataattaaaaagaatggagtttgtttttattttttgttttaaaaatgatgtatagtgtgtggggtttgatgttggaggtttttttagtagatatatttttaataatattatattttgaaatttaagttgttgtaaaataagataagtaaagatggtattggtagggatttttgaggttttttttatgtatttttgaataatttttatatggtttttgtttgaatgtttttaggtatggggaatttattattttgtgaaatagtttgttttattgtttttaagtgaatattgtgagaaaaatatttttttttgtaaagagttaagttttatttgttagtattttttaggtatttggtattagttttatattttgggggaatttaaaataaatgttttttttttattagataatttattaattatttggagatagtggttgtagttttttgttttatgtagttattttatttagtttttttttggaatttttgatgtgaatataagtttttttgttatgtaggttttttttttgggttttttatttatttgtgtatattttggagaggttgtttgttttgtgggtgagatttattgtgggttgaattgtgtttttttaaaagatatatgtaagttttgattttttagtatttatgaatgtgattttatatggatatagggtttttgaagatgtaattgggttatttgagggtatattgaattagagtgggttttaaatttaatgataggtgtttttataagatagaggtaggttgggtatagtagtttatgtttttaattttagtgttttgggaggtaaagttttattgtttgagtgtaggagtttgagattagtttgggtttttgtttttataaaaaaattaaaaaattagttaggtatggtggtgtgtgtttgtgttttagttatttggaaggttgaggtgggaggattgtttgagtttgggaggttgaggttgtagtgagttatgattatgttattgtattttagtttggaggatagaatgagaatttgtttttaaaaataaattaaaaagataatagagagggtagtttggatagagatataagaagagatatagggtgaaggttaggtggggggtaggttgagttgtaagttgaggaatattaggggttgttggttgttgtagagtttggagaaaggtatgggatagttttttttggaatttttaggaggaatgaatttttagatattttggtttgggatttttggttttagaaattttagggaagatattttggatgtttttgtttttgtttttgtttttgtttttgagatggagttttgttttgttatttaggttggagtgtaatggtgtgattttggtttattgtaatttttatttttaaggtttatgttatttttttgttttagttttttgagtagttgggattataggtatttattattatgtttggttaattttttttttttttttgtatttttagtagagatggggttttattatgttagttaggatggttttgattttttgattttgtgatttaattgttttggttttttaaagtgttgggattataggtatgagttattgtatgtggttgattttggatgttttgagttattttatttgtggttttttgttatgatagttgtaggatagtaatatagggttttagtagggtggtttggtaagggttttttttttatggtagtttttattttgttttatttgtagggttatttagatgtttattttggttttggttagtaagtgttagtgtatttttttatgtttagtagtaagggtagtattgttgttgattaagtatttgttatgttggggtttttgtgtggttttggggttttttttttttgtttatatttggtagtttagtttttttttttgtattttatttgatgttggggttttgggtaagtttgggggatttgtgttttattttatagattttttagttgattttattagtttttgtatagggtttgtttgaagggttgttgggttgggtgttaattagagtttttagtagtagtttttttggttttttgattttggtttatgttttaggggtagggtttttaagggttttggggttgtttttgaggttagtttttttgttgattgtagtttatatagaggagggtttaattttgagtgtggttgtttgtgattttgagagatgtttagagttgtagatgtgttttttaagttttttagagtttgggataggagttatttaatgtttttagtgttataggtaaaatttgttttttttaatataaattgtttttagttttatttaatgttttttttaatgagtagtaataaaaatatggttttttgttaaaggtggggtttatagttttttagaatttggttttttgttaggtttaggtataatttataggagtgtttgtttttgatttgtgtgtgtgtgtgtgtgtgtgtgtgtgtgtgtgtgtgtgtgttgtgtgtatgtgtatatgtgtttgtgtaagtttttttatgtgtagttttgggaagggtggagaggtttatggaaattttttttggtatttagtaagttagaaaaaaggaaaatgagatttgtgtatatatgtgtaagtgtatatatagtatataggtatatatatatatatatttagtatatattatataggtttatatgtgtatatatgtgtaggtatatattatataggtttatatgtgtatatatatgggggtatatagtatataggtatatataggtatatatatttttttgtaggaaagtttttttttgttttttattttgtagggtttttaggttttatgaaataagattgaattttggaagtttgataaaaggtttgtttggagtattttggttatttttattagtttttttagttgtggaaggtatgttttgtggtatttatttattttttgtttttatttttatttttgtttttgtttttttttttttgtttttttagtttatatgttgtttgttttaattttaatttttgtatttggatgggaattattttttttgtagaagggtgtaatgtatgtggggatatatatatatatatatatatatatattgtattggaggagagaagagaggtagagttttttttagatttagagttttagtgagtgatgggattttttttagagaatatgtgtagaagtttgtgttattggaagaagatattattttgatttatattttttttttttttttttgttttttttatagagaaggaaaggttttagtaaatagtggttatgtgggttttttgtatgttattggtagttttttagttaggattattttttttttatttttggaagtataagaatagagagaagggtgagtttttgtttttgggggtttttttttgtatttttttggagttaattttagggttgtgggttgtataggaaggagggtttaataggttttttgtttaattttgtttttttagtgaggagttgatttattttgtttgtaaaagatgttggttgggatttgatgttgggtaatttgaggagaagagaagggggataggggttgaggttaggtttttggttttgaaatagttataatttttggggtagagtttaagggtgttaggttggagattttatatttggttagttggtagttattattttggtttagttagtggtttagggtattatagttatttagattaggaattttatttttttggattgtattaatgaggaaggttgagtttgtaggttttatatatttatggtaattttaaggtagagaggttattgttaattgagggttatgggtaggagttttgtgagtttattagtaagtttggaagattaaggtttttggttatagagagtagttgttatttggttaattttgtagaaaatattatagttttggataaaatatttgaaagaataaaataataatagtttggagttagtatagaatattttaagtaggtagaagttggagtagagtttatatttgatagaggggaataaaattagataagtttttggtttttggaggtttttttgtttagaggtaggtattgagtaattaaatttggataaaaagttttaaaagtatttagggaaaaataatatgtggtttataggggaatagttagatgaatgttgattttttgatagaaataatggaggttaaagatattggaattttatattttaaagttttgaaagaaaaaattgataatttagaattttataattagtgaaattatggtttaagaatgatagtaggttgggtatagtggtttatatttataattttagtattttaggaggttaaagtaggtagattatttgaggttaggagtttgagattagtttggttattatggtgaaattttatttttattaaaaatataaaaattagttgggtatgatggtatatgtttgtagttttagttatttgggaggttgaggtaggagaattgtttgagtttgggaggagaaggttggtgagttgagattgggtaggagttttgaaattatattattgtattgtagtttgtggggagatagagtgagattttgttttaaaaataaaaataaaaataaaaaaagaaagaatgatagtaaaataaagatttgtagataagtgaaaatgaaagggaattagttgtttgtaaatttgtattataaaaattgtgaagtaagttttttaagattatgggaaatgagattagatgggaatttagttttttaggaaggaatgaagagtataggatatagtaaatatatgggtaaatagaaaagattttgttttatttttaatttttttaaaatgtatggggttgtttaaagtaaaaatttttttattgtattgtttagtttataatgtgtatggatgtagtaaatatttaataattattatatataggatggaaagtggtaaatgaatttataggattgtttagtttttatattttttttttatgaagaaaaataatgttaattttaagtagattgtgaaaagttaagaatgtgtaatagaatttataaagtaattattaaaatagtaatataaagagatataattaaaaagttaaaataggttgggtttagtggtttatgtttgtaattttagtattttgggaggttagggtgggtggattgtttgaggttaggagtttgaggttagtttggttagtatggtgaaattttgtttttattaaaaatataaaaattagttggttgtggtggtaggtgtttgtaattttagtatattagggaagttgaggtaggagaattatttgaatttaggaggtagaggttgtagtgagttaagattatgttattgtattttagtttgggtaatagagtgagattttgttttaaaaaaaaaaaaaaaaaaaaaatataaattaaaatagaattttaaaaaatatttaattaatataaaagaagttaagaaagtaagatgaaagaaataaatattaaagagtaaggtagtagttttaaatttagttatatttataattatgttaaatagaaatagtttgaatattttaattaaaaggtggaggttgttagaatgaataaaatagtaagatttaattatatattatttataaaagatgttgttttagtataaatataggttgaaattttttgtttggaaaaagatatattgatgttgtttgaatgatgatggagttatgttttgataaatttattataagtggaaaataaatattattttaaaaatgtatttaatatatttaatttattgaatattttagtttagtttagtttattttaatatgattagaatatttattttagtttatagttgagtaaaattaataaatataaagtttattttataataaagtgttgattattttatgtaagttattgaatattgtattgaaagtgagaaatataatggttttatatatatttaaagtatagtttttattgtatatatattatgtttgtattatggtaaagttgaaaaattgtaagttaaattattataagtttttttataagtttttttagtttttttatgtattttaaatagtatgtttaagaaggttggagaggttatataaatattaataaagttgagtttaagataaaattattatgagataaaggaatatatttattatggttaaatgattagtttattgagatattattataattataaatgtgtatgtatttaattaaaggagttttaaaatatatgatataaaatttgaaagaattaaagggagaaatgggtaattttataattataggtggagattttttttttttttttttgagatggagttttatttttgttgtttaggttggagtataatggtgtaattttggtttattgtaatttttattttttgggtttaagtgatttttttgttttagttttttgagtagttgggattataggagtttgttattatgtttagttaatttttgtatttttagtagagataaggttttattatgttgtttaggttggttttaaatttttgattttaggtgatttatttgttttggttttttgaagtgttgggattataggtgtgagttattgtgtttggatgtatagttggagattttaatattattttagtttatttaggatgttaaaataaaatgttttaggttgggtaatttataaatagattgtagtgtttatagttttagaggttgggaagtttaaaattagggtgtttagtgtttggtgagagttagttttttgttttagagatgttttttttttgttgtgtttttatatggtagaagggattaattttatttatgatgattttgtttttatgagttaatatttttttgatgttttaatttttaatattattgtattagagattaagttttaatatatgaattttgggggatataaataggtaggttatagtaaatattatttttttaatatttgagaaataagtattagataatttgaagaatattggtaattagtaattgatttaattagtagttataaagttttatatttaggaagtttagaatatatatatatattttttttttaagtgaaaatagtgtatttattaagatatatattttgggttataagttttaaattttaaaagtatgtaaaatatgtttgtttggttaaagtaagattaaattagaaattaatagttttaagatatttagaggagttttgattatttgtaaattaaataatatatttttaaataatttatgagttaaagaggaaattataagaaaaattttataatattttaaatgaaatgataatgaaaatatagtatattaaaatatgtaggttgaagttagtgtttagagggaaattgtaagtgtttatattagaaaagaagtaaaaaaaaaaaaaaaaaaaaaaaaaaaaagatttaaggatttgttttaagaatttggaaaaatgggttaggtgtagtgtagtttatgtttgtaattttagtattttgggaggttaaggtaggtggattatttgagattaggagtttaagattagtttggttaatatggtgaaattttgtttttattaaaaatataaaaattagttgggtatggtgggtatttttagttatttagaaggttgaggtaggagaatggtttgaatttgggaggtggaggttgtagtgagtttagattatgttattgtattttagtttgggtaatagagtaggatgtttttttaaaataaaataaaataaaataaaataaaataaaataataaaaaaaataaagaatttggaaaaatatgttagttatttatgtattgttttttaattttgtatatattttgttaggttttgttttgtgatattggattgaggttttatgagtttttttttttggttaaatatagttatgttaggttttatttataggggataatattgtggggagttgttaggttttgttgaggtagtagtttttttttttggttttagggttttttttttttttgaaggtatagttgttagtggtgtgtgtttagtggggtttgttttgtattgagtttttttagtattttagttttagtttaatgggattttagtaaattttttagatatttagtttttgtttatttatattttttagtaggttttttggttatttagtaagttgattttgtagatttattttttttatattttttggtaagaatttttttgttattagtaggttgtaggtttttgtggtagttatatattttttaataaggtttgaatgtaagatgtggtaaggtgtggaggatgttttgagtttttggttttttttttattaattttagtggtagtaattgtttttgtgtgtttgtatatatgttttaaagtatttattatagaaaatttattattttaattatttttaggtgtgtagtttggtggtatgaagtatatttatattgttgtgtaattattattattatttattttatttttttaaattgtaattttatttttattaaatattaattttttatttattttttttttttttagtttttggtaatttttattttattttttgtttttttgaatttgattattttagggattttataaaagtgaaattatatagtatttgtttttttatgtttggtttttgttatttagtatgtttttaaggtttatttatgttatagtatgtgttagaattttttttttttttttttttttttttttttttgaggtagttttgttttgttgtttaagttggagtgtagtggtatggttttggtttattgtaatttttatttttttagtttaagtgatttttttgttttagtttttttagtagttgggattataggtatatgtttttatgtttggttaatttttgtatttttagtagagatagggttttgttatgttggttaggttagttttaaatttttgattttaagtgatttgtttattttggttttttaaagtgttgggattataggtgtgagttattatatttggttttttttttttttttaaggtagaataatattttattgtatagatggattatattttgtttgtttatttatttgttggtggatatttgggttgtttgtattttttggttatgggaaaagtgttgttataaataagaatgtagtatatttgtttaagtttttgttgttagttttttggagtatatatttagaagtggaattattggatgttatggttattttgagtttaattttttgagtaattgttatattttttttatagtagttgtattattttatatttttattagtagtgtatggggttttaatttttttatatttttgttaatatttgttgttatttatgttttggttaatagttattttaaagggtgtgaaattatattttattgtggttttgatttttatttttttgatgattagtgatattgtgtatttttttttgtgttttttggttattggtatgttttttgtggaaaaatgtttgtttattgggttgtttttttttgttttgtggtttagttgtaggagttttttatatattttggatattagttttttattggatatatgatttttaaatatttttttttattttgtggattttttttttatgttattggtagtattttttgatgtataaaagttttaagttttggtgaagtttaatttattatttattttttttgttgtatttttggtgttatatttaagaaagtattgttaattttaatgttatgaagttttttttttatgtttttttttaaagtagttgttttttatatttgttttttttatattttttagagtttttttgtataaggtaaaataaattttatttttttatttttatttataatatttagtgttttagttttgatattagatgtgtggtttttttttgttgatttttaagtaattttttaatatttagtagtttttaattgggtgttttgtaatttagtttaattttgatattaattagagttagtgtagattttataggttaagggttttattttataagattgtttttaattttagagattagttgtaagtggtaagatattaggttatttataatttttgtttgatttggttataaatttgaggtttttataattttttttttaggtttaataatttgtttgagtgatttatagaatttaggaaattagtttatttaaaattgttgatttattataaatgatattttaaaggatataaatgaatagttaattggaagagatgtataagaaaggtatgaaggaagtggtatggagtttttatgggagggtatattgtttttttagtatttgtaggtatttaataatttgaaattttataaattttatttttttgggtttttagggaggttttattatataagtatgatatgaaatttttggttattgatgattaatttaatttttatttttttttgttttgtaggaggtggatgggaaaggttgtaagttttagttttttaattataaggttgggttttttggtaattagtttttatttttaggttgtttaggagtttttagttattagttgtttttttagtaaataaaaagatatttattattttggagattttaagagttttaggagttatatgttaaataaagttgggggatagagattagatagatagatagatagatagatagatagatagatagatagatagatagatagatatattgatttttgagatagagtttttttttgttatttaggttggagtgtagtagtgtaattttggtttattataatgtttgtttttttgggtttaaattatttttttattttaattttttaagtagttggaattgtaggtatatattgttatgttaggataattttttgtatttttggtagatatgaggttttattatgttgtttaggttggttttaaatttttgagtttaagggatttgtttgttttagttttttaaagtgttgggattataaatatgagttattgtattgagtttagtttaaatatattttttttatattataatgttatttttttgtgatttttttaatagttaattattttttatagttaagaatattttatattataagttgttatttaaattgttggtgtggtttttgttttttgattgggttttgattaatgtgttgaagtaagtataaggaaggaagtaatgaagataatagagaaatttaaggaaatggatattagaaaaggggagtttaatgttggttttttaaaaagatttagattgataattttttagttaggttgttgatgagagggagatggtgaatataaagttataataaaaggaatgaagtgttttttttatggattttattgatattatagtgataaggaatataggtatattttattttattgtgttttatagatattgtattttttataaattgaaggtttgtggtagttttgtattaagtaagtttgttggtattatttttttaataatatgttaatattgtgtttttgtgtaggagtttgatgatttttgaaatagtttaaatttttttattattattatatttgttatggtgatttgtgatttttttttttttttttttttttttgtttttttttttttgagatagagttttgttttgtttggagtgtagtggtgtgattttggtttattgtaagttttgttttttgggtttatgttatttttttgttttagttttttgagtagttgggattataggtatttattattatgtttggttattttttttgtatttttagtagagatggggttttattgtgttagttaggatggttttaattttttgattttatgatttgtttgttttggttttttaaagtgttgggattataggtgtgagttattgtgtttggttttttttttttttttttgagatggagttttgttttgttgtttaggttggagtgtagtggagtgtagtggtgtgattttggtttattgtaatttttattttttaggtttaagtgatttttttgttttagtttttttagtagttgggattataggtatttgttattatgtttggttaattttggtatttttagtagagatgaggttttattatgttggttaggttggttttaaatttttgattttaggtgatttatttgttttggttttttaaagtgttgggattataggtatgggttattgtgtttagtgattagtgatttttaatgttattattgtagttgtttttggggtatgatgagttatatttagataagatagtgaatttatttaataaatgttgtatgttttgattgttttattgattggttgttttttgttttttttttttttgtttaggtatttttattttttgagatttaataatattgaaattaggttaattaataattttataatggtttttaagtgtttaagtgaaaggaagagttatttgttttttattttaaattaaaagttagaaatgattaagttgagtgaggaaggtgtgttgaaagttaagataggtaaaagtgagattttttatgttaaatagttagttaagttgtgaatgttaagaaaaagttattgaaagaaattaaaagtgtgattttagtgtatatatgaagaagaagaaagtaaaatagttttaatgttgatatgaagaaagtttgagtggtttggatagaagattaaattagttataatatttttttaaataaaagtttaatttagggtaaagttttaattttttttaatggtatgaaggttaagagaagtgaggaagttggagaaggaaagtttgaggttagtagaggttaggttatgaagtttaaggaaagaagttatttttataatgtaaaagtgtaaggtgaagtagtaggtgttgatggagaagtggtagtaagttatttagaagatttagtttagagtattgatgaaggtggttatattaagtaatagaattttagtatagatgttttattttttattggaagaagatgttatttaggatttttatagttagaggggagaagttaatgtttgtttttaaagttttaaaggataggttgatttttatgagaggttaatgtagttgttgattgtaagttaaagttaatatttattgattgttttaaaaattttagggtttttaagaattttgttaaatttattttgtttatgttttagaaatggaataataggttttatttgatagtatatttgtttatagtatggtttattgaatattaaaaatttattgaggtttggtgtggtaatttatgtttgtaattttagtatttttgaaggttggggtggggggattatttgaggttaggagtttgagattagtttggttaatatggtgaaattgtatttttattaaaaatataaaaattatttaggtatggtgttatatgtttgtaattttagttatttgggaggttgaggtaggagaattgtttgagtttaggaggtggaggttgtagtgagttgagattgtgttattgtattttagtttgggtaatagagggagattttgttttaatttgaaaaaaaataaaaaaataaaaaagggttaagtatggtggtttatagttgtaattttagtattttgggaggttaaggtaggtaaattatttgagtttaggagtttaagattagtttggttaatatggtggtgaaattttatttttattaaaaatataaaaattagttaggtatggtagtgtatatttgtagttttagttatttaggaggttgaggtaggagaattatttgaatttgggaggtggaggttgtggtgagttgagatagtgttgttgtattttagtttaggtaataaagtgagattttgttttaattaaaaaataataataaaaaaaaaataaatagggtttggtgtagtggtttatgtttgtagttttaatgttttgagaggttgaggtaggtggattatttgaggttaggagtttgagattagtttggttaatatggtgaaattttgtttttataaaaaatataaaaattagttaagtatggtggtgtgtgtttgtaattttaattatttaggaggttgaggtataagaattatttgaatttgggaggtagaggttataatgagttgagattatgttattgtattttattttgggtgatatagtgagattttattaaaaaaaaaaaaaaattattgagatttattgtttaggaaaaaagaatttttttaaaatattattgtttattgataatgtattttgtgatttaagagttttgatggagatgtatgtaaagatgaatgttgtttttatgtttgttaatgtaatatttattttgtagtttatggagaagggataaatttgatttttaagttttattatttaagaaatatattttataaagtagtatttgttatagttagtgatttttttaatggatttgggtaaagtaaattgaaaattttttggaaaggattttttattttagatgttattaagaatatttgtgatttataagaagaggttgaaatattaatattaataggagtttggaagaagttgattttaatttttatggatgagtggtttaagattttagtagaggaagttattgtagatgtggtggaaatagtagagaattagaattagaagtggagtttggagatgggattggattgttgtaattttatgattaaatttgaatagatgaggagttgttttttatggatgagtagataaagtggtttttggagatgggatttattttaggtgaagatgttgtgaatattgttgaaatgataataaaagatttagaatattatattaatttatttgattaatttgtggttagggttgaaagaattgattttaattttgaaggaagttttattgtgggtaagatgttattaaatataatgtgtgttatagaaaaattttttatgaaagaaagagttaatttatgttaaaaattttagttaagaaattgttggttaggtgtagtggtttatgtttgtaattttagtattttgggaggttaaggtaggtggattatttgaggttaggagtttgagattagtttggttaataaggtgaaattttgtttttattaaaaatataaaaattagttaggtgtggtggtaggtatttgtagttttagttatttgggaggttgaggtaggagaattgtttgaatttgggaggtagaggttgtagtgagttgaaattgtgttattgtattttagtttgggtaatagagtaagattttgttttaaaaaaaaagaaaaagaaaaaagaaataaagaaattgttgttatagttatttttaatttttagtaattattatttggttagtagttattaatattgaggtagattttttattaagaaaaagattatggtttgttgaaggtttagatgattattagtattttttagtaaaaagatataatgattttatatattttaatagattatagtatagtgtaaatataattttttttttttttttttgagatggagttttgttttgttatttagtttggagtatagtggtgtgattttagtttattgtaatttttattttttaggtttgagtaatttttttattttagttttttaagtagttgggattataggtatgtgttattatatttagttaatttttgtatttttaatagagatgaggttttattatgttggttaggttgtttttaaatttttaattttaaatgatttgtttattttggttttttaaagggttaggattataggtatgagttattatgtttggtttaaatataatttttatatgtattgggaaattaaaaagtttgtgtgatgtgttttattgtaatatttgttttattgttgaggtttggaagtaaattttaggtatgtttgtattatgaataattttaaatgagtaaatttaataatttatttgaaagggataaatttttttaaagtataatttattaaaagtaagataaggggaagtaaaaaaatttgaataattttttttatatattaaattgaatttgtgattaaaaataaataattattttttttagtagaaaattttaggtttagatggtttttttggtggattttattaaatatttaaggaagaaataatattaattttatgaaaatatagaaaataaagagaagggaatatttttaaattaattttatgaagttaaaatgaggttgataaagatattattgaaataaattaataaataaagaaaatattatattaatattttttatgaattaatatgtaaaaatttttaaaaattgggtaaattaaatttagtaatatataaaaaggatgatattttataagtaagttggattttttttagaaatgtaaggttggtttaatattaaaaaattaggtttgtatagtggtttatatttgtaattttagtattttgggaggtagaggtgggagtattgtttaagtttaagaattgtagattagtttgagtaatataatgagattttatttgtataaaaaattttaaaaattaaaaattagtttggtatggtggtatgtgtttatagtttttgttatttaggaggttgaggtgggaggattgtttaagtttaggagtttaggttgtagtgagttatgatggtattattgtgttatagtttgggtaagagtgagattttgtttttttaaaaaaaaaaaaaaaaaaaatggggggtaaaaattaattattgtaatttattttattaaatgaataaaagataaaataatgattatttttatagatgtagaaaaagtatttattaaaattatatttatttatgttaaaaaattttagtaaattaagaatagaagggaatttttttaatttgataaaggttatatatgataaatttaaagttaatattataagtttggtataggtaaggatgtttattaattattattatttaatattgaattggtagttttaattagtgtaataaagtaagaaaaaaaaataaggtattaagattagaaagaagtaaaattatgtatttaaattttaaaagatttataaaattattattagagtaataaatgattttggaaaagattataggatataagatttatatataaaaatttattgtatttttatatattagtagtaaataattaaaaatgaaatttaaaatttattttagtttaaaatagtgttaaaagtaaaatttttaggaataaatttaataaatggtatgtaagattttttttttgaaaattataaaataatgtaattttgtagagatttttttttagtagagaaataaaagaaatataaaaggatttttaaaatggagatatattatttatataaaagatttaatattgttaaaatgttaatttttttttaattgatttatagatttaatataattttaattaaaatttatattgtatttttgtagatattaataagttattttttaaatttataaggaaatttaaaggatttagaatatttaaagtaatattttagatatttgagagattttatattaagatttattgtaaagttatattaattaagatgtggtattagtaaaggaatggataaaatattaagaaaatataatagtgttttaatatagggtttatatgtatatagtatatatattaatataggattatatatatagttaatataggatttatatgtatatagtatatatattaatataggattatatatatagttaatataggatttatatgtatatatgtatatatattaatataggattatatatatagttaatatggggtttatatgtatatatgtatatatattaatataggattatatatatatatatagttaatatagggtttatatgtatatatgtatatatattaatataggattatatatatagttaatatagggtttatatgtatatatgtatatatattaatataggattatatatatagttaatatagggtttatatgtatatatgtatatatattaatataggattatatatatagttaatatagggtttatatgtatatatgtatatatattaatataggattatatatatagttaatatggggtttatatgtatatatgtatatatattaatataggattatatatatagttaatatagggtttatatgtatatatgtatatatattaatataggattatatatatagttaatatagggtttatatgtatatatgtatatatattaatataagattatatatatagttaatatggggtttatatgtatatatgtatatatattaatataggattatatatatagttaatatggggtttatatgtatatatgtatatatattaatataggattatatatatagttaatatggggtttatatgtatatatgtatatatattaatataggattatatatatagttaatatggggtttatatgtatatatgtatatatattaatataggattatatatatagttaatatagggtttatatgtataaatgtatatatattaatataggattatatatatagttaatatagggtttatatgtatatatgtatatatattaatataggattatatatatagttaatatagggttgatatgtatatattaatataggattatatatatagttaatatagggttaatatgtatatatgtatatatattaatataggattatatatatagttaatatagggtttatatgtatatatgtatatatattaatatagggttatatatatagttaatgatttttagtaaaggtgttaggtaatttaatagagtaaggtatgtttttttaataaatggtgttagaattggatatgagtatagaaaaataagaattaattttgattttaaattaaatataaaaattgatttaaaatggattatataatattttgatggttataataggttaaaaaatgtaaaaatttaaaaaattaaaaaataaaaggaattatagaatatataattataaaatttttagaaaataagagaattttttttgattttagtgtaggtaaagattttttttataggttataaaaattataaattgaaattggaaaaagttgataaattggattttatgaaaataaaatatttttgtttattaaataatattattaagaaaattaaaaggaaaggagtaatgtggaaaaaaaaatttatgatatatatatttgataaaggatttatatttagaatatataaaaaatatatgaaataatatttttttttttttttttttttgagatagagttttgttttgttatttaggttggagtgtagtggtgtaattttggtttattgtaagttttgttttttaggtttatattatttttttgttttggttttttgattatttgggattataggtgtttgttattatgtttggttaattttttgtatttttagtagagatggggttttattgtgttagttaggatggttttgattttttgattttgtgatttgtttgttttggttttttaaagtgttgggattataggtgtgagttattgtgtttggttaattttttttttaaatgagatttatggggaaatagttaaatgaagaaataataaagtagtaataaaataaaatttaagttttattttattgtgtagttgtaggataaagagtagaagtttgtagttggggaataaggtgtttatttttttaagtattataaaatgaaggttttagaaattatttgattttgaaataatataattttaaaaagaagtaagatgtggatagataattttataaaggaaaatatgtaaatgattaataaggattttggaaaattgtgtgattttataagttattaagaaaatataaaataaaagttttaaaaaaaaatgaagtttggaataattgaataaatatataaaatgataataaaatgaattttgattttttattttatattatatgtaaaagttaatttataaaagttatataattttaagttttttaaaggaaaatataaatatttttgtaatttggtagggtaggtaaaggttttttataaagaatatagagagagaattataaagaaaggagtttgttaaattagattttataaaaattaaagtgatatatttttgtttattggaaaatattattaagaaaatgaataggttgggtatggtggtttatgtttgtaaaattggtttttggggaggtagaggtaggaggatagtttgagtttaggagttttagatttgtttgggtaatatagtgagattttgtttttgaaaaaggaaagaaaatgaataggtaagttatagattggaataaaatatttgtaaaatatgtatttgataaaagattagtatttagaagaaaaagttaagtaatttaattttaaaatgagtaatagatttgaaaagatattttataaaggaaaaatatatgaagagttaattatgaaaatgtgtttaattgtattagttattaggttaaagtaaattaaagttataatgagatgatattattatatgtttattagaatgattaagattttatagagtgatagtattaaatgttggttaggatgtggagtaattagaatttgtatttattgttggtgggagtgtgaaatggaagggttattttgggaaaagatttggtagttttttataaaattaaatgtatatttattttatatttattttaggtgtttttatagaataaatgaatgtttatatgtatagaaaaatttgtataagaagaattagtgtaataggtttatttataagagtttttagatggaaatagttaggggttttttaataagagaatgattaaaaatttatagaatgtttatatagtggatgttatttagtaataaaatagaataaattgttggtatttgtagtaatatgggtagttttaagaaatatttaaattggtaaaattattttgtggtggaaaaaaagtataattgtggttgttttggggaaggtggggattgtgatgtatttggaggggtatgaggaatttattggggtgatagtgatgttttatgttttggttaggttgggatatatgtggatatttttgttaaaatttaaagaatggaatgttttatatttgtgtattttagggtatatatattttattttaaagaaaaataaaaataattatagataaatgttggattttagttaatgaaatgtaaattgaggtgttgataggatgttgtgtgttgatttttgtagtttattttaagtgtattaaaattagtgtggatgttggtggttagagggatttgtggtgaagtaaatagtaaaatggttgttgtggaatttaggtggtaggtgtatgggtgtttattttagaattttttatggttttttttttgtggttttgttttgttttgtttttgagatagggttttgttttgttgtttaggttggagtgtattggtataattttagtttattgtagttttaattttttaggtttaagtaatttttttattttaattttttgagtagttgggattttaagtttgtattattatgtttgattaattttttgtattttttatagagatgggattttattatattgtttgggttggttttgaatttttgggtttaagtgatttttttattttaattttttaaagtgttgggattatagttatgagttattatatttagtttttttttattttttttatgtttgaaaagttttatggtaaaaagttggaaaaatgtaaaaaagattgaaatttattaattaaaaataggaaaaataaaataaaagagatggtaggagattattttttttttttttaatttagtttttaattttttttttttttgtttagttaggataggaattttaagggtttgggttttttgtgtttgtgtggggaaggaggtatttttgtgtttgtgtgggggttggttatttgttttttggtgtattttttgtattttatttttttttgtttgtagtgagtagttatagttggtggaaattatatttaggtagtttttgtttataaatttagtgaaaatgtaaattttgtaggagttggatttttgagagtttgtggtgttatttgttggaggaaaggttttttgtatttgagtttttttttttttttttgttgttatttgtttttttgtttaggttgggtgggttttttttttgtaattttggggtattggtgtatgggaaatgtttagtgttttataatttttttttatttatattttaatatttagtttttagtggatattgtttttgtttgataaatatattatataggtatagtttaagattatttattttaggaggagtataagttttagtgtttattattttagtttttttttttttttttttgatgtagtgatataggtttaggatattgaagatttttgattttataaatatgttgaagttaattattttgaagttgtagtttttattattattattattttttattttttgtaaagataaagttttgttatgttgtttagtttggtttggaatttttggatttaattgatttttttgttttggttttttaaagttttgggattgtaggtgtgagttattgtatttagtttgaagttgtagttttttaattattgttaatagtaatatttatttttttgtgagtagtagggtttgttggtatggttgatagttttgtattattgtattgaatttgttgtttgggattttaggtgagttttgatttttagttggagggataagttgtgtggggttgggtagggtgaattgtgggagattaagtttagattgagggttataagttatatgagtattggggttaggtagggatagtgaaggagatagtgtaattttgaggaaagataatgttatagaatggagaggtttaggtttggggtttttttttgttgttggataggtatgtttgtgttttttttttagtttttgtgatggttaagttatgtgttttttgagaggtaagtgaggtttttgatagtaggttttaggttttaattaaattgtttgttttgtagggtgagttgtataggtgtttttatttttgatttttttgaatttttgttgtttttaagttttatttattttttttaggtgaatagaaatattgtttaggggagaatggaggaagaatttaggaaaggttgtttgagagtttggttgagtttatgttattgttaagagtagtgttaaaatttaggagttggtgagattatggtttagggtttatattaatatgagggggtgttagttttatgattaatgagtttttgttttattattttttgttatttatattttgagggttatagttagtatgtgaattggagttggtttttggtatttttttttttatattagttttataatgtgaggtgggggtttgtttttagaggtatttggagtagtaggtgttttaagagggggaagtttttttgaagtttttttttatttatggtataggatgtagaggggatagagtattaggaatatttagtgattataggggtttgttttgaaggagaggaggtaggaggtagggagagtggttgggaggttagttttggagtgtttattttttattttgagggagaggaaggaagtagaaggtgagtatagggagttttagttggggatggagtgggggttgtagtttgattgtgttgtttggagtgggggtatggattgtagtttttatttatttgtttggttagtttgaagttattttaagtttggagattttatttgttttgtttattttttttagggatggtgtttaaattttgaagttttggttggtgttgtaaatatgggagggaggttttgttttattttagttttaagagttagttaagaatgttttggatatttgaattttgttttgagttagaggttgggaagaaatttgaaggatggtgggatggtggatagtagtttttaggtattaggtattagggtttttgtttggggatgggggtattagtaggtgttaagtgtattatattagggtttattatgtttttgtttagagatttagtattttatgaaataggaaggaatgagggatgagtgtgtttttttttttaatattttagtttttgttttgaggttgttaggtatttaatttttttaggatttaaattattttggttttatttatggttaagtgtattaaattatagttaggattattgggtttagatattaaaagtgttttttttaaagttggtagttattagggtagtatagggtagtgtaaggttgggtagggttggttatttgttagtatttagtggtttttgttggatgttgatgggggtagttaggtaggtgggtttatttagtaattaaagagattttttttttttaattttttttttaaagagattttgattttttttttttagttgtagggtttgtagtagttttttttttagtaggtttttttgtttgtttttggttatttttagtagttatagggtattgaggttttattatagtgagaataaaattaagtttttattagggtttttaaggtttggtatgatttggttttgtttgttgtattggtgttattatggtttgtttttgaaaatatattttagttatttttattttttttaggttttagttttgggtttttatatttgttgttttttttgttaggttgttttttttttggattttggtttggttgggtttttttggttattatagttttagtttagtgttattatttagaaagggtttttattaatttttttgttatatatatagatatgtatttttagtaatttgtttttagtttttttatagtttttatttaaaattatttatggatttgtttatttgtggattgttttttagttttaattgttaagtaataagtgattagtgattgtgtttttgttgttttttattataggttaagtatttaagagaggggttgtatatagtaggttttaataaatatttattagatgggttaggtatggtggtttatgtttgtaattttagtattttgggaggttaagttgggtggattatttgaggttaggagattgggattagtttgattaatatggtgaaattttatttttattaaaaatataaaaattaattaggtatggtggtggatgtttgttattttagttatttgggaggttgaggtaggagaattgtttgaatttgggaggtggaggttgtagtgaggtgagatggtgttattgtattttagtttgggtgatggagtgagattttgtattaaataataataataaaatatttgttagaagaattaaagtagtttgtttgtgtttaataggaatttaagagtataagatgaatttaattaaaggatatatatagtaggtattttatagttgatatttgttggtggagggagattaggaaagtggggagaggtagtgtttgggtatggggatattttgggtatggggatgttttggatatagggatatattgggtatggggatattttgggtataggatgttttgggaatggggatattttgggtatggggatattttgggtatggggatgttttggatatagggatattttgggtatggggaaattttgggtatggggatgttttggatatagggatatattaggtatggggatattttgggtatggggatgttttggatatagggatatattgggtatggggaaattttgagtattgggatgttttaggtatggggatgttttttgttatttgaaattttgtagttttattatatttgtttgttttagtaaattggtttaaagagtatttttaagtttttatggtaaagttttagagttagtgtttttttgttgattttgagggtgtgttgtttatttagtgtttaagttagagtttttttatttagaaaaaaaaagaggagggtggttttatggatggaggtatgagggtgtttataggtagagggagtttttgggttgagatttgtgttattttttgttttaattttaaggtgtagtttggagtttaaattagtttttaaatgtgggttgttggttaagaggaatttttttatttatgatttttttttatatttagtttttattgtttagagtatgttagttttgtttgttttggtttttaggatttttttagggatttttaggttttaagttagggtgggtttgaattaaggtagttttagaatttatgttaatgtttttgttagtgggagattttggggagtattgtgtgggatgtatggggttaggtgggggtatatagtgagtggttttagaagttttggttgtttggagtgggggggtgtttagagtaagagatgggttaggaagttggagtgagtaaggaggttttagtttttggtgggagtaggttgggtaaaaataaattaatttgagggtagtagttagtgagattattataggaggggtggtggggttggaggggttttaggagtttaggagagggaggtattgttagaggtaaggttggtagatgagagttagtgttggtaggattaatttgttatagtagttatggtttattttttttttttttttttatatatgtttttggggtttatggaatttattagtttattataaaggatattataaaggatataggggaagagatgtgtagggtaaggtatgggggagggatgtagagtttttatgtgttttttaggtgttttattttttaggagtttttatatgtttatttatttagaagtttttggaattttatttttttgagtgtttatggaggttttattatgaaggtatgattgatttaattattggttgttgatgatttgtttaatttttagttttttttttttatttggaggttgtggggtggtgttgaattttgtgattttatttggttttttttgggaattattttgaagttgttagttggtttgttaattatgagtatttaaaaagatattattttggagattttaaggattttaggagttgtgtgttaggaaatggagatgaaaattaagtgtatattttataatatgatagttagttttttttaattttagttttattttttgttgtgttgttggttttagttttttgtgttttagggtttttgaatatattgttggttgtttgtagtgattgtttttgtttgttgggtttgagtttggtttattttttttatttttttgtgtttagtttgaaggtgtttttttgaggtagtttttttgatttggttttatgaattgtaggttttgttttgttattggttttttttgttatatttgttattttttgtgttttatgtttattgatgtggttttgtatttgtgtagttttatgagggtaaggattgtgtttggttttgttttttatgggattttagtgttaagtttatagggagtatttaatgttgaatgaatgaatgagtgattggtaagggaggtttattttgttatgttgggggttaaaggttgttgggtggattatatgggtgaggttgggtggggagggaagtagagatgattttttggaagaaggggtaggaggtggggaggtgggtgtggggtgttgtataaggatggtaagtgtttttaggggtgataagttaatttagagtattaggtagtagaaaaaggttgatatttttatgttttatttttatttagggagaggttaggtttttgggaaagttagttttttgttgttaggagagttttaagggaagttttattagttgttgagttggttatagtggaaatttatgtggtgggtgggaggggtttgaggtataggggtttgggtggtggttttaggatggagatttgtgtttagattatgaggggtggttttagggatgattatttttaaataggaagtagataaaggtatagatggtagaagtggaggtagagaatgggttgtaggggtttttttagagggagagttgagtaaggggataggttggaaatatttagtttttatggtttgaagtatagatagttggttttatatgtaggttgggtagttatattatttagaataaggggtatgtttgtagggtaggttttaggatgttttgggttggttttgttattagtttagaaagatggtttaggtttttttggtagggagtatgtttagttaggttttgggtaggagttgagattttttggttggtttgagaggggatgattgagtgtaggtttagtttgggatttttttatttttttttgttatttagtggaattagttgggtgtgagaaaagaagagaagtgaattaagagtttagagtatgaggttggattagtttttatattatatgtaaaaattaatttaatttgtattaaagatttaaatttaagagttaaaattataaaatttttagaagaaaatataggggaaaagttttttgatgttgtatttggtaatgattttttggatatggtgttaaaagtataggtaatagaagaataaatagataaagtggaatgttatagaagtttaaaatatttgtatattagtttgggtgtggtgatttatgtttgtaattttggtattttgggaggttgagatgggtggattatttgaggttaggagtttgagattaatttagttaatatagtgaaattttgtttttattaaaaatataaaaattagttgggtgtggtggtgggtgtttgtaattttaattatttaggaggttgaggtaggaaaattgttggaattagggaggtggaggttgtagtgagttaagattatgttattgtattttagtttgggtaatagagttagattttattttaaaaaaaaaaaaaaaaattgtatattaaagggtattaataatgtggggagaaggtaatttatggaatggtagtaaattataggttagatatgggattagtatttggatattaatttatagattttttaatatttagtaataataattatttaaattaaatataggtaaaggatttggatagatatttttgtaagaatatgtgtaaatgagtaataaatatgaaaagatgtttaatattattaattattggggaattgtaaattaaaattataaggagagattttttataattatgagttttgggtaggtaggaagatgtttggtggggagttgttggttttatgttgtttttagaatttttgtaggggttaagtttgattttgatattttattaggagtatagaaatgagtggaaaaggttaaaggttattttaaagggttagaggggtttagtaaggagtttgggatatggaattatgttgtgtatttagatatatggggataatagggggatgaaaggtggtttttaaaatttatatttattttagagtttatgaatatggtttatttggaaaaagggtttttgtagatgttatgaagttaaggattttgagatgggattattttgggttatttagtgggttttaaatttgagaaagattgtttgtatgagagatagatagggggagatttagggtatagaaggaggttttgtgataatggaggtagaggttgagtggtgtggttatgagttaaggaatgttaagggttttgggagttgttagaagttgttagaggtgagaagtaggtttttttttggagtttttggaaagaattaggtttgttgatgttgtgattttggatttttggtttttagaatggtgagagaagaaatgtttggtgttttgagttatttagtttgtggtatttggtgatggtagttttaggaaattattatagggattagagtttttatggggttgggtaggaagtgggtgtagagtgtgttaggttaggttttttattttggagatggaaaagtagagttggagaggttgagattggataggtattgagtgtttaggggtaagaatttttaggggatggtagaggttattggggatagtatagtgagggataggagggaggggtgagggttgaggtattgttttttaggaggttttggttttttgtttattgatgatttaggaattttgtaagaggagttgggttttattttgtgttgtattgtattagatggattttggtggggatagatgtttagtgatagtgtggttaagttttttttaggattttgggtttgtatttatgattatgtatagatggttattttttttgtttgtagtttttttttgtggtttgtttttagttttttagtttaatagagttttttagtggaaagttttttttttggagattttttttttgttgaaatataagtttttggaataagataaaattgtttaatttgtaaaagttataaagttgttttagaataaaaaaaaagttttgatttttggttggaaggagtggttttttatgttttagtggttagttattattttatgatttatgttggttttgttgataaattttttagtatttttttaggggaaggttatagtttttagggagggtgggagagtatttaggtttttgtttataaattagattggagttagatattgttgagggagggataagagggtaggttttggggtttttaagttttttttggggttggtagattattgtggatttattagggtaggattatttttttttataaattttttttgggtagttgtagggtagtttgagttggatatgttttatatgttagtttagtggggtatgaggtatttatagttatgtttggaagttagtgggttggtatttgttgggtaggtttttgttatataggtatagtgttttttttatggtttttttttaggttagagtatgtttggggattagagtagtttttgtagtggtttgtagtttgataatgtggtgtgagttatgttttgtagagaagaagagttttttagtgagggaagaggtgtttataaaatttaggatatgtgtagaaatttgtaggaggtgggggtgttgtttaggggttgtgttgtttttattttttattttgtagatgatggaattgtggtttagagttgttaagtggtttgtttaaggttatttagtagggataggaaggaagttatttttttagggattgtgtgggagtttagtgataattaaagattagtgttaaagtttgtttaggatgagaattttattaagggaaatagttttgggattgttgtgtttatttggaaggtagttagtttataattgagtttttaaaaatgtatgtttttttatatgaaaatatatttgaatgggattttgtagaaagtattttttattaaggtatagtttgaggggaggtttttgttttatttttggttgtgttgtttttagttaagggtagtagggattagagtggtttttggggtatagtattggttgtttttaaagagtgttttgtttagtttatgaaaagtttgtgttttgtgagtttgggagggtgttattatttttagttttttagggagtattatttttaaatttatgtttttttgtttagtttttagattttttgttggttatttatttgggttttggttagattatttataaagtgaaggttgaatttgaggttttttgaggtttttgttagttaggtgggtggagtgatgtttttttggggttggtggtttaggaggtaggggatttattgtggtttgtttaggttgtttggtggggtggttattttgaggatggttttattgtgtaagtttgatgaaggttttttttagtgttttttgttttgtggtttttgttgggtggagagtaggatgttgggttttatatttatttgttttagtgggtttgagtttttgagtttaaatagataagatgtagttttattgttatttaagttttttgttgttttttttggtttttttttgaggtttgtttgttgtgtttgattgggtgtgtttagtggtataatatatatttgttttattagttttaatgtgataattaagatgtggttttgaggttgggtgttgtggtttatgtttgtaattttagtattttgggaggttgaggtgggtggattatgagattaggagattgagattattttggttgatatggtgaaattttatttttattaaaaatataaaaaaatatggtgggtgtttatagttttagttgtttgggaggttgaggtaggagaatggtatgaattagggaggtggagtttgtagtgagttgagattgtgttattgtattttagtttgggtaatagagttagattttgttttaaagaaaaaaaaaaaaaaagatgtggttttgggagtagtggtggaggggattatatgttttagagaggagttattgagatgggttttttttttttaggttttttagggattttttaatatatatatagtggtaattaatagattagggtttaaggtatgtaggggttgatatttttagtgattttttgttttatggtttgtaggttattttagaatatttaaagtttggagtttggtttagttattttatgttttttagtgttgggtttagagggtggtatgagtggtagaaattgttattattgttaattattgatgatggtgttggttatgtgagatggtagttatggtattgtatgtgagtgaagggattaaggaggttgggtttgggagggagggtttggaaagttggggtgaattaaaggtaggggagttttttttttttttatttgtttgtttatgttttgatgggtttgtgtttgtggtaagggggttgttagtgtgaatggatatatgtatatatatgtatatatatgtgtatatatatgttaggtttttttgagtgttgggagtttttttttttataattaattgttaggaaggtatagaaatgttattttaggtaggagattgaggtagttttgaagatagattttggttggaagtaaaaaataaattatatagtggataaattaattattagttaggtttaagtgttgttgttttagatttgagttaggggggtaggttttttatatttttttaaggttttggtgttaatagttttagtattgatagtggttatgatatgtaagaatggtatattggaaaatgaaagggaagtagttaggagagaggagagttgagtttaaataaaagttagatttaggagagtttagtttttgagatggagtttattttatgagtttggaattgttaaaaagaaaagaaatatttttgtgaaaaatgagtaaaagtgttttttgtatgtttatttttttaggtataaataaagttttgagtttagggtagtggggggtggttgatggggagggggttgtttgtgtatttgagatttggtttttttttatttttatggatatatttagtagtggtgggagttttggtgttttgtttagaggtggtttttttttttttatttttgttgtttttttttttttagttttttttttttttttttttttttttaaaaatattttttgtttggtttaatttttttaatttgttgtaattatgaatgtatttgaattattatatttttatgtgttgattatatgtttgtgttttaaattgaagtagtattgtttttttaaaatgggaggaaaaagggagtaaaggagagaaatttaaaaataggaggtaggagagagggtttgaagtgggttttgaggagtttggtagattattgggtttgtttgtgagagttttagagttttggttgtttggtttggttggtggttgtagaggttttgagtgtggtttttggtagttttttttttttattttttttagtttttgttgttttgaggtttgttgtttttttttaatatttatttggagatgtttaatttagatttttggaaattaatttatagagttaaatttttgatgatttttaaagttttttattttttttgttttgtgatgttatgatttttttgggtttaagggtttaaaaagtttagtttttgtgtgtttgttttgtttttttttgttttgggttggttttagtttttttttattttgtattttaatgtggttgggtaggaggaatggttgtgttttaggttagtgtgttgagaaaaggttttggagtatttgtttaggaggaattttgagaagttatttttttttgttttattagtttgtagtgatagaggtagttgttgtttttgtttaggtagagagggtgaatgggatggggattttttggaagatttttattatatatgtatgagttagtgagtttttagttgttttttgggagggagtgagtttttttttttgggaatttggggttttattgggggattagtgttgttttttattgtttatttggggtttttagaggttgtttatttatttggggggtttttattagtatatggttagggtttatgttgaggttaagggtttagtagagtaggtgggggtttataatgtgggtttttggggtgggaattaggggtattttttttgtttttaagttttattttaagggtttatttaaatttgagatatggaggttggttttgttggtttaagtttgtttaaagagaatgtgtgtttgtgttaaggttgagaatttaggtaatttttttgaaaattttagattgttagtttttgttgagaaagggaggatgtgtggttgtattatggaagtttttttgtttggttgtatagggttggtataagatagttttgttttttagataaaatattttttagtttgtgttgttttttaaggtttttaataaatttataatatttgtatttttttattttgatatattttgtaggtttttgagtttataatttttgttttatagagttaggtgagttatttgtgattaggtgaggtttatgtatagtttttggttagatgatagagttaaaggttttgaagtgttattttaggttatagttttgtttgttttttgtttgggataggattttaaatgtaatttttttggtagaaaggatatttttttggggggtggggaggattatttttagttttttgggagatattaagtaattatttttttttaaagagtttggaggatagttttataggtagttagatagtgagggaggtggggatagtattttagttgaggtgggaggttggggaggaagggagggattatagttatgagagaaggttgaataatggttttagggatagtatgttttaatttttagatttgtaaatgggattttgtttggaataagagtttttgtatttgtgatttagttgtagattttgttgtggtgagagtattttggatggtttaggtggtttttaaaggtagttttggtgtttatataagatgggggtagagggagatttgatatagatagggatggttaagtggagatggggtttggagagatttgtagatgttggtgttgaaggtaagggttatgtagttataagttaagggatatttatagttattagaggtttaaaggggtaggtgatgaaggtagtggtttttaatttttttggtatttgggattggttttagggaagataatttttttatagattagggagtggggagatggttttgagatgatttaagtgtattatatttattattttattttattttattttattgagatagagttttgttttgttatttaggttggagtatagtggtattattttagtttattgtaatttttgttatttgggtttaagtaatttttttgttttagttttttaagaagttgggattatagatgtttgttattgtgtttggttaatttttgtatttttagtagaaatggggttttattatattggttaggttgattttgaatttttgattttgtgatttgttagttttggttttttaaagtgttgggattataggtataagttattgtgtttggtttttattttttattttttgagatagagttttattttgggattataggtgtgagttattgtatttggttataagtatgttgtattgattgtgtattttatttttattattattataatatataatgagataattatataatttattataatgtagaattagttggagttttgagtttatttttttgtaattagatggttttatttggtggtgatgggagatggtgatagattattaggtattagatttttataagaagtatgtaatttagattttttatatgtgttgtttataatatggtttatttttttataagaatttaatgttatggttgattagataggaggtagagtttgggtagtaatgtgagtaatggggagtgattgtaaatatagatgaagttttgtttgtttgttagttatttattttttgttgtgtaggttagtttttaataggatatatggggttgggaatttttgttttagagtttttagagggttatgtttagtggatattttgattttagtttggtgattttgattttggatgtgtggtttgtagagttgtgagaggatggttgggtgttgttgtgatttagttagtttgtggttatttgttatagtagttgtaggaaattgatgtagtgttatagatggagttagggtttagtttattggagttgttttttgttattttatttttttttaaaatattgtgttaagttaattattaataattattgattttgatgggtaggaattgtagaggttttttggtttgtttttttaattttttttttaattttgaaataatattttttgttggtttttttgattataaatgtaatatttttttttgtattgagtttagaaataagagaaaaagtaaaaagtagaaattttagttgggtaaggtggtatgtgtttgtaattttagtattttgggaggttgtggtggaaggattgtttgaagttaggagtttgaggttgttgtgagttataattgtattattgtattttggttgggtaaaaagagtgagattttgttttaaattaaaaaaaaaaaaaaagaagaggaagaaaatttattaattttatttgagattttttatatgaatttttgttgtggggtagggaagtttaggaaggttttatgaggttttgatttagtttggttggtggtgggaatttgggaatagttttgagtgaggggttgggttatgattgagtttatttatttagttattttttgtatgttgtgtatattatgggtttgatggttagggttggagtatttgttgagtatagttttgatttttagttttatttagtatggtttggtttgaggtttattttttttttgtgtttgaaaatttaaatattttggtttaggtgggggattatttgaaatggaaaatttggtagtattgattggttttgaagaggtaggagttagttatgagttggttgggaggtgagtgtagaggtggtgaggtaaggttagtagagggtgggggaggtgagggttaattttttattgtgtatggtgtaagtattaagggggtattttattaggttagtgtagatttaggtttttgtggtggattttttgtggtttttttttttagaggaatattgaagaggtttttgtggttttgttttagatttagaggtatatttgtatattaaatgtattgagtaattttatagtgagggagttgggtttggtttaatttatttttttttaaattggattaaaggttgttgttttaggaaggtagggtttttaggtttatggttttgggaaattttggttgtgttagtttatgagtttagtttttagttattttagtttgtttatattttggagtgggtattgttatttaaaagttttttttagatagtttttagggtggtatttttgttttttattttttatagatttttggttatttttttgtgatattagtattattggtttatagttttttttaattgtaaagtggggtttagtggtataggttgggtttggtagggtgggaaggaagagtgaaggttattttgtttttaatagtattggttgggttttggaaaggttggaatttatagataggaaggaagtgttatatttatttaatttgttttgtgttagttagggggtattttgtagaaagaagttaggtggttgtggttgggtgtagtggtttatgtttgtaattttagtattttgggaggttgaggtaggtggattataaggttaggggttttagattagtttgattaatatggtgaaattttgtttttattaaaaatataaaaattagttgggtatggtggtgtatgtttgtaattttagttatttagaaggttgaggtaggagaattgtttgaatttgggaggtggaggttgtagtgagtttagattatgttattgtattttagtttgggtgatagtgtgagattttattttaaaaaaaaaaaaaagaagttaggtggttattttttagtttttggtttggtttaggaattgttttttttttaagatgttattaaatgttttttttattaggaagttttttttggttgttttttttatttttgtttttgttttagaatatggtttggtttttatggataattttgatattagagtttaatagagatttttttttttatggaaatttatattttaaattgaatatgtgtgtaggataagtttttgtttttatgtgaaataaaagtgaaaggtgtggattatttgtttttttttatttttttttataataatttgggttttataggggtttagtaggagttaggtttagtttagttgttttaggtgtattattttgggtattagtgtttttgtttttttttatgaagtatagttttattttttggtatttagtggggaggggatatatattaggtattttttagggtggattgtgttttttatattaggttaggaggttttggggttggtttagttatttagaaaagggagtaggtggtttaggtgatattgatgtgggtagtaggggtttttgggaaagggtttttgtaggattggttttattttgttttaggagtatatattggggaagggtgttgtgtggaggtggagagaatgtatttttggttgaaagtatgttttttgatgttttgggtttggatttgttgttattttttatgtttttttatttaatatatgttttagtaaattttttatgttgatgagtgttaagttatagaggatgtataattttttgttttaaaaagtgattttttttgttgggtgtggtggtttatatttgtaattttaatattttgggaggttaaagtgggaggattatttgaggttaagagtttaagattagtttgggtaatatagagaaattttatttttataaaaaaaaaaaaaaaaaaaaaaagtttaggtatagtggtttatgtttgtaattttagttatttgggaggttgaggtaggagaattatttgaatttgggaggtagagattgtagtgagttaagattatgttattgtattttagtttgggtaatagagtaagattttattttaaaaaaaaaaaaaatttttttttttgaaatagggttttattttttttgtttaggttggaggatagtgatgtgattataatttattgtagttttagttttttgggtagttggaattatagggttgtattattatgtttagttaattttttgtatttttagttaagatggggttttgttatgttgtttaggttggtttggagtatttgagtttaagtgatttttttattttggttttaaaagtattgggattataggtatgggttattatgtttagtttgaaaatattttttttaagaattagttagttatggtggtgtataattgtagttttagttatttaggaggttaaggtaggaggattttttgagtttggtaggttgaggttgtagtgagttataattgtgttattgtattttagtttgggggatagagaaagattttgtttagaaagaaaaaagaaaaaaaaaagatttttttatttattttttgtttatttttagatttaattattgaagtttgtttttttgaattaaaaatgaaggagttttgttttggatttttttttgttgattttgttattgtatttgttagtagagttagttaagattttttaggttggttttagtttggtttgtttatagttttttaagtaagatggatttttaggttgaggttagttgtatttttttttggaatttttttttattttttattgtgttttagattttggttgtttttaaataaatataatttagttatttttgtttttggggttgttgtagggtttattggtgtaaattgtttgggtaggtttgttgttttaggagtttttttaggttagtgtggaaggaaattaagataatggggagaagtagtttggttgggtttaattttatttttatatgtttgtgtttagttaattatttgggttgtagtttgataggagttggagttggtgttttatttttagagggggtttttgattgtttttgtagagtgagggaggtttgggggtgtagaggttaagggtttttgtagagtttgttttaggttttttgagtttaagtttttttgtagttaatggaagatttttttgagagtgggtgttttttattttgtttgtttagtaggtgtttagtaattgtttattggataaataatgaatttgtggatttaatgtgaagatgatttaaattagtgtttttttatagaattttttgtaatgatgttaatgttttgtatttgttgtagttaatatggtagttatatgtggtagtgaatgtttgtaatgtggaagggttattaaggtaaagagttttgtatttatgttataatttaaatttaaatagttataaatgtttagtgtgtgttttgttatatagattttttttgttattttttttttttttttagagatattgtatttgttattaattttttatttgggaggtaaatggagaaatgttattttttagttaatgtaaaagaaggttaatatttgtattttaagttagttttttgggtaatttttttaagtattttttattaaggttagtttagtaatattttttgattgtttgttatgtattaggaaagtattttgttgtggttttggtttgaggttatggaggatatagaaataattaaggttaagttgatagaaggggtgtgataagatggtttaaagttattgagttagttaggaggtttaggagtatggaagttttgttttttagaggataagtggtaatttatttagggggggtttgagtatttagagttaggagtgtagaagtagggggttttaggttggaaagtggtattagggttaggttgggtggtagtatgaatttatttttgaggttttgggggtggaaattaagggttttatgagtaagaagatttggtttaggtttaatggaaatgattgggtggagggattttattatttggtttttagtatatagggagggaagtggtaattgttttttaaatgttggttgtggaggggaaggagttatagtagggtaggggtggggaggatggtatttgttggtttaaggagggatgatggaggtttaattaagatatgattgtgattggggtagtttgtttaagggttagtatgtagagggtgagttgatgagattttggtagtttgttgagatttgggggtgttggggaggtagaggttaaggttaattttgagattttttgtttgtaaatttgggtgggtggtaaggttgatattagagaaatagaggaagagtgggtagttatgggtgagagaggaagtaatgaattaggggtgtttgtaagagtttaggggtaaggtttttgggtagttaagatgttggtggttttttttatgattagttttttttatgtggtatatttttgtttgtatggttgggtatggggtatttgtttgtttgatatattttgagtagttattttgtgtattgaggtaatgtggtatggtgttttggggaaatagtgaggaggtattgtataggttttatttttttggtattttttgttttttggggatggtggtagttaaataagtgatagttaattgttaggagagtttggttttgatttattaggtggagttaggtatttttgttggaagaggtatgggaattagtataggatgaagggaggtagtgagtattagtttaggttttgtttttatagggttttttttttatatttatttgtgtaggtgttttttgtgagggtagagatatttgtagtgtttgagggagattttttgtgggtggggttgtttatttatagtggttaggtgggaggtgtattagtgttttgtggttgttataatggattatagttgtggggtttgaaaaaatggaagtgggtttttttttatgttggaggttagaggtttaaaattaaggtgttagtaaggttatattttttagggaggttttggggtggggtggggggggggtttttttttgtttttttttagatgttttttggtttggggttgtgttattttattatttgtttttgtttttatgtggttttttttggtgtgtttgtggtttttttgttttttttaaggatattagttgttggatttagggtttattttaatttagaatgattttattttaagatttttaattatttatatttgtaaagattttatttttaatttttaggttatattttgaggtttttggtggatatgagtttgtgggggatatggtttaatttaggatagaagggatgatgggggtattggggaaaaggttatatattttagaggtattggaagatggaagagtaggatttagtgatatgggatgttaggtagaggagttggttttaaggattttagttggggtttgagggttagagggagggaagtttaggtattattgagatgaaatgttttgtgtattgtgggaaatagggtaaaagtttgttggatgtttagttagagaggtggttgtttgaggtatagaaaatgagtgaatatgggagagtttattagaaggttatttgggagggtgtggtggtaatatttagaagggttgagaagtgtatttttatagtttagttaaatttatttggggaaatatatgtttttggtagtattagtaatagagaagatttttggtgatgttattagtgggttatgggatgggtaaattttgtttttttatatagaggaatatttgttagttgttaaaataagtgaattaaggttttgtggatttatatggataagtttttatgttgttatgttgtgggtataggtagggtagttattgattttagtgaggtattaaggatgtgatgttgatgatggtatttaagaggagatagatttaggttgtttagttatatgatgttgatgattgtatgtaagaggagattaggttggatgtggtggtttatatttataattttagtattttgggaggttaaggtaggtggattatttgaggttaggggtatgagattagtttgattaatatggtgaaattttgtgtttattaaaaatataaaaaaaattagttagatatggtggtgggtgtttgtaattttggttattgaggaggttgaggtagaagaattgtttgaatttaggaggtagaggttgtagtgagttgagatggtgttattgtattttagtttgggtgatagagtgagattttattttaaaaaaaaaaaaaaggagatttaggttttttagatatattattgtttagtatagatgtgtttgtttggggttagattttaatttagaggggtgggtattgtagtaggagtggggttaggatggagaaggttatttagggttgtggttatatttgtaatgttttattttttaagtgggatggtgagtatataggtgttttattattttattttttatatttttgttttgtagttttaagaattttattttttttttaaaaggaaagaaagtgtgtgagttgattaaagtgttgattatggtgttatttaagtttttgttagaaatgttatttttggtttagttttaaatataattttgagaagagtttttgtttttttggggagggtaagagttttagatataggagattggttagatgtggatttatagagaagttgggttgggaggatgggatggtagatagttgtttggggagtgttaaatggggaggttggagatgttggggtgtttaggaatgaatttttgtttggattagggttttagtaaaagggaggtagggagaaagaaagaagttaagaagatgaggaaagggtgttttgggttagagtttatagaggtttatagagggaggattttgtgtgttagtaggtagttttatgtaaatttagattattagtttgtagttttgggatttagtaaattatgttttaggtttttaagttgagttgtgattgtggttgttaagtgttgatagtatagaattagttagtttgagtagagggaagtaattgttgggggaggttgtgtttatgtagtttagggtgttaggtttttaagatgtaatttttataagaattgggggattttttttatttattttattagaagttggttaatgagagggaaggagatggagaggtagattagatgtggagttggagaaaagttttttagaaatatagtagtggttgggttgtttagtggttagtgtttaatatgattgtgatgggtggagttttttttaattatagtgttgaattatgtagttgtttaggggtttttagttagagtattatttttttttttttatatatagttttattttgtattgtaaggggttttatatgtatttaatgtggatatggtattttttttatttttattttttgtaaaaagttattttttttattgtttaggtttggtggtgtatagtttatgggtattgtatttatttttggaaggtagatttaggaggtgtttgtgttgtttttatagaagtaagtttaggattagaagtaggttttgggtttagaattttgaggttttaggtgttagtgtggtttggaattgtttagttttatagttattagttatatgtagatataagtggaaatttatttaaaataaataaataattttatgtaagtaaatgagtgaataaagtaaatgtaaatatttatattttgagtgtgtaatagatttaggtggttaagtggttattatataggatggtggagtgtagatgtatagaatagatttattattatagaaggttttattagatggagttggtttagagtatggaggtggtggttttagatgggtatatgtttttgtttttgtaggtgttttgttttggtaggatggttgttttattttgttttgaaggtagttttggtttataggtgttttatttgtgtggatttgattttgggtttgtgttttttggtaattttgttttttttagaatggttaatttatgaaggtatagtttttgtttgtttgttattatgatggtagttaggggtttggtatttagttggtttttagtatatatgtataggtgattatgttatttttgttttttttagagttttttgttttttaggggaggtaagtttatttattgttgtgatttattattttttttaaatagaaaagttattagatgggtatttgttttagtttggttgttggaagtgatagttaagaataatgtaggtttttagaaatagaggtattagtatggttatattggggttaggtaggggagattagggatatttagtggggagaagatgatgtgtagatttagttttggggggtaagggttggaggtagagttttgatttttttgttttatttttttgtttaggttgtatttagtgttggtagagtttttttaagtttataagttgtaatttgtgttttggatggttagttttagagttttgatgggtgtatttgttttttttttttattggttagtgtggaaaatttttaaatatatggaaaaagtataaggagtagtatagtgattattgttagaggtttatttatttttttttagataatattggatgtatttgttttattttggagtattttttattttgtaaggttgtagggagtttatagatattgaattaatattgagaggtttatggttaaagttatttgtttatggtatatttgtttttttagtattttaaattaaattatttagttttatttattttttgtttttttttttgttttgtatatatgggtttgttttttgagtttgggggtggttgtttttgtttttataaggattatttttagtagggtagtgttgataggtttggaagttatttgagtttaaagttgttaaagattgtgtttttttgggaaatgggtaagtggttttatttatttagggaagttaggtggggaggtaggttttagattagaatgaagggattttagtataaatatatttatgagttgggtggggttagagtggagtgagttatttatttgggttattggagttattaagtttttggagttggttattggaggtttgtgtgttttttaaagatagagataaagggtaaaggttatataaggttattggtgttttttttttgggtggatgattaatattaggaatgtttttgtttttgtttttgttgtgagttttagagttagaaatggggtttatttggggatagaggttttatttttttaggtaattttggatgttggagggatgatagttattgttgtttggttgttggaggggttttgggttaaatttttatatatatttttttttaagttttattatttttgttttgtagataaggaatttgagtttttatagagtgttatttttttgtggttatatagtgaatgagagttgtatataggtgagtttatgtttattagattttaagttgggttgtatttaagtgtgtttttgttggatggagtttttttttttttttatgtttatttgttttatgaattagggtttttttatattagggtttataatttatgggtagttttgatttagttttttttatttttagggttgggtgtagttgggttggatttggggatggagtgggataggttatttttattttttgttttaggagggaataaaaatagaattttagattaatgtagttttttgtggtatgtgttttttttgtttatatataggttttggtttggggttgtttgttggagaggtttatggtaggtaagttttaatttgaggagatttgttgaggtgttaagttaagtaaatttgaaaggttgttaggaggagtggttttgggagtataggtggttattttattgttgtagagtatggtattttggggatgttttttgggtaatgttatatagttattttttagagagttttagggatatataattagtttagttttattaatagtgagataagggattaggtagatttagatatttttttgtatttgattattatgttggttgttggttaaagatgttagtttttttttggaattttttagaaaggtttttgtagtatttatttatttatttatttatttatttattttatttatttatttatttatttatttatttatggattttatttattttattatttttttatatatttatttatttatttatttaatttatttatttagttttttatttatttatttatttattaatttatttatttgtttatttaatttatttatttattaatttatttatttattatttatttatttatttatttatttatttatttttttatttatttatttatttttttttttatttattttataattttatttttaaattgtgattagatggaaatgggtgtagttagtttgtttttaaaggtttagagtggaggtagagtgaattgtttatttggtttttgtgtttagtagtttaggtttgtatatatgttttataattataggatattagatttagtaattggtagtagaatgagtatagtgtattttttgtggaattagtattgatagggtatttatttttattaagtttgagtttttttggtgttggagggaatttttagatgggttttaattttagttgaatttattttttagggaaagtaatattgtgagaaatgtgtgtgatataaggttttaaagagggtgtgggttgtgatttttggagtaattagggaggttttatggaggagatgaggataaagttgagttttgaaggagggattggaggatgttgagtagggatatttatttttgtttgtgagggtttgatggtaggttgtgagttgtattttagttttgatttatttaatttataattttagtaggtaggtgtttttgttttattttatagaggaggaagtgaggtttagggttgggtaaattgtttaaggttgtatagttgtggaatttatttttagtatttttagtttgttttagttatgtttgtgattttatttagtattttttttttggtgtttatttattttgtttattgttaagtaataaaaattttattaggaaaatttaggggtttttggttagtttttttagatagaaaggtagattttggtgtagatttttaggaagtaaggatggaagggttagtatttgttttttagaaatgatagtttttttaagattaggagagatggtttagagtgtagttttggtgggttgtttaggattaggaggggagaggagtggggaggaggatgaattttatttttaaggttgttgagtggtatatagtgagtttggattttttagttttagttgagtttatttttatgatggttatgagtattttttttatatatttgattggaagttgtattgtatataatgtatatggggttattattttttgttttatatatttttatgtatatattattagtgtattattgggatattttgttgtttggggttgagagtgaattagaattttgtttataaatttagtatattttattgtggaaataatggggggtaaggaggggttgtttagtaaagaataggatatatgtttttgaggatggagttatttttggttgagatatttttgtaggggatgttggtgataaaggttgttttatttttttttttgggttagatggatattatttttgttttttgttttttagtattaggtaaaaggaaaatagaagaggttttatttaggttaaatattttagggttttttatttgtaggaaatatgttggtttattttttttaaatttagtatgggggtggagaaatggtggggaaaatagtatttgttttagattttttgggtggagtttttgttttatttatattgtttatttttttgattttttaaaatgggtatttggtgtttggtagtttttggtatagagaagatgtaaagtaaattgtttataagaagggggtgagtgtagtttgagtattttttgtttttgaataaattgttaggtttagtgtagttgttgttgttattgttgtttttaggaagggatttttggttatgagtggttttagtttagttttttggatttaattatttaggtttgtgtttgagtttagtaaagaggtagttagaaaagtttttaagatatttaatgattttgtggttttagttgagaagtgagttatttttatgtgattttaaaataaaatatatttagaaggagagaagataattgaaatttagttgtttggagttattttagatgaaagtatttgagtttttgggaggtaaaggaggtaggaaagtttggagttagatgattagaatttgaatgtagattttgttaggtttttgttgtgggttttgggagatgatttttattttttgagttttagtttttttggggatagagatggtgtttatttataggttgttttgagttaatgaggttatatggtgtaagtattagtatagtgtttggtataaaattaaaatttaataagtgatattattattattattattattattattatttttgagatggagttttgttttgttatttaggttggattgtagtggtatgattttagtttattgtaatttttgttttttaagtagttgagattataggtatttgttattatgttttggttaatttttgtatatttggtagagatagggttttattatgttggttaggttggttttgaattgattttaggtgatttgtttgttttagttttttaaagtgtttggattataggtgttagttattgttatttggttgtgatattattataatattaatattataatagttggttaggtatggtgatttatgtttgtaattttagtaatttgggaggttgatgtgggttagttatttgaggttagtttgagattagtttgattaatatagggaaattttatttttattaaaaatataaaaattagttgggtgtggtggtatttgtttgtaattttagttatttgggaggttaaggtaggagaattgtttgaatttaggagatggaggttgtagtgagttgagattatattattgtattttagtttgggtgatagagtaagattttgttttaaaaaataataataataaataaataaaatatattttgatgagatatggtaaaagatagtagaaggtaggagtttggggatttattatgggttggtgttttaagtagaaagaaatgtagtgtttataagttagagagtagatgttgaagataggagatgagtggggttttttggttttggagaggaaagggtgagtttaggtagaaagagtaaatttagggtgttttgtgtagtgttttttttgtggaattagtttagggtattagtagtatagtttttttttagtagtggagattaggttaattgtttagtgttttttttgtttttttgttttaattttattaagtatagtttttttttgggtatagtagttttgtaggggtggatattgatttatgtatttaggagtttagaggtttttttttttttatttatttatttagagatggagtttttttttgttgtttaggttggagtgtagtggtattaatttggtttattgtaatttttattttttaggtttaagtgatttttttgttttaattttttgtgtagttgggattataagtatgtattattatgtttggttaatttttgtatttttagtagagatggggttttattatgttggttaggttggttttgaatttttgattttgtgatttttttattttggttttttaaagtgttgggattatagatgtgagttattatgtttggttaggggttttttttaatggattttttttaatgtatataatttggggaatttagatataagaaagatatagagtatgaaggttttttattggtttgtttatttttagaggtggggttttaggtggtttaggttggttttaaatttttggttttaagtaatttttttgttttggttttatgttgggattataggtataagttattatgtttagttatttttttttttatttgggttgttatgttagaatttggtaagttataagatggaaatgtttaaataggtatttagaatttgagtagatattatttgatgtattattgttgttattttaatgattgaaatgtatttattatatttgtttttttaaaggttattttagatttttatagattttatttgtgatgtaagatagttattttaaatttttttgtgggtttgaatagattagatttttgaatttttgggtagagtagggatggggttgttttagaggagggtgatattgttatatttttgttttgtttttgtgttgataatgaatgaggtttggatagttttttttttattaaaagttatatttttttaaaaaggagttttttaggatgaggtgttatgataatttaattgtgtataaatatttatttttaataatgatagaagttatttatagaaaagaatttatttttggttgggtatggtggtttaggtttgtaattttagtattttgagaggttaaggtaggtaaattatttgaggtttggagtttgagattagtttgattaatatggtgaaattttgtttttaatgaaaatataaaattagtttgtatgtttgtaattttagttatttaggaagttgaggtagaagaagtatttgagtttgagaggtggaggttgtagtgagttgagattgtgttattgtattttagtttgggtgatagagtgaaatttttttttaaaatatatatatatatatatatatatatatatatatatatatatataaatttatttttatttttttttttgaaatttttgagagaggttaggtgtagtggtttatatttgtaattttagtagtttgggaggttgaggtgggaggatggtttgaggttaggagttggagattagtttgggtaatatagtaagattttatttttattaaaaaataataaaagtttaaaaagtttttgagatagtttttggggaaaggtgggttatggagatttttattttggttatttgtgttttttttgtttgtttttttgtggtttttttttattttgagtttggggtgggggtggtttgagtttaggatgggggtggtttgagtttggggtgggagtggtttgagtttgggatagggtggtttgagttggggtgggggtgttttaagtttgggttgtgggtattttgagtttggggtggggatgttttgagtttggggtgggggtgttttgagtttgggttgagggtggtttgagtttgtgttgggggtggtttgagttgggatgggggtggtttgagttgggatgggggtggtttgagtttggggtgggggtgttttgagtttgggatgggggtattttgagtttgggatgggggtgttttgagttgggatgggggtgttttgagtttgggatgggggtggtttgagttgggatgggggtggtttgagtttggggtgggggtggtttgagtttggggtgggggtgtttaggatgtataggttttattttttttttttgaggtttagtttgtttataggagttgtgaagggttggattaaagttaaaggtttaaattttagatttatttttagatttagtggataattaaaatatttaagtttatttttaaaggaagttgagataaggagataatggttattttttttttttttttttttttgtttttggtttttgttatttggagttgtgttttgaagaggtatattgggtattaggtttttttggttttgtttttattttttgtttagatatagaataatttttttttatttttaaggttgatatgtggggttgtggattaaagttaatttatttatttatgaggggagtaatttttttgttttaggaatttgtttttataggagaataaatattgtagaaggtattgtttttagtggtggtgtatgtttgtaattttagttatttaggaggttgaggtagaagaattgttagaatttaggaggtggaggttgtagtgagttaatattatgttattgtattttaatttgggtgaaaagattaagattttgttttaaaataaaaaaagaatagtattttgtgttaaggttaggggttttagttattttttttgtgaagtggaaggggtattattagtttttgtgagaaggaaatagtttatttaattataaaatgttaattaaaggaggtagtatattggttttggtgtggtgttgttggtttttgtttggggtaggaggagggttgggggagagttaaaagttaaagaaggtttatggaggttgttttttttttggtgattagttttttttttgatggtaagttgttaatagtatttggtttttaggttggggaaggtgagattagtttatatttgtttagggttttgttttgtttgtatgggtagtaggtgtttattttgttagatggttttgtttattatagggtattagtgttagttaaggatttatagagtttttttgtaaaggtttattagtgggtattgggattttgggttttatttatatagggtttttatataaaatataggatgtttagttaaatttggattttagataaataattaataattttttgaagagataaggattttgttgttttatttaagttggagtttagtggtatgattatggtttattgtaattttgaatttttggatttaagtaattttttaattgtagttttttaaagtattgggattgtaggtatgagttattaaggttagtaaataatgaattatttttaggtataagtatattttaagtttgttgtgggatatgtttatattaaaaattaatttttgtttatttgaaatttaaattgaatttattgttgggggagataatggagtgatggattgatagaggagtatagagatagtttttttaaatttttagttgattaaagtttggtttttagtttttttgggtttttagagatgtattaagggtggaagtgattaggagggagataaaaatattgaagtttgagtgttagtattgagttgtgtggttttggataggattgttttttttttgagttttagttttatatgttataattggttaataatagttataaagtatttgaagttaatggttgggagtttgttttaggaggtaggtattattaggatgtagagagagtgaggagtttttaaagttagtttaggttaggtatagtagtttatgtttgtaattttagtattttgagaggttgaggtgagagaattatttgagtttagaagtttaaggttgtagtgagttgtaattgtattgttgtattttaggttgaatgatagagtttttgtttttaaaataaaataaaataaaataaaataaaataataaagttagtttgtgtattggattgtatgttgttttaaagtatttaaagtgagagaggttaggaagtaatgagatgtagaaaggtagggggaggaggtttagaggtattagagaagatagttgatttttatttttatatatttttggggtattttgagttttatttatatatttaggtgagaatttttgtatttgtgaaagtaatttgaggttgagagaattaataggaaattgttttattttttatgtagggtttttttataaataaggttgagttgtagtttattattgtagttgagttttttgtagtagttgtggtggggaaggttttttaggaggtttgagtaatttagaaatatttatagtatattttttagtttttttagaggtttttgttgagatgaaagtgttttggtttgtggttaaagagtttagtatattgggtagttatagtttttattatattgatttggttattaggtttttatgaatttagtgaggggagatgggttttttagggaagtttgttgatttttttatattgttgtaaatgtaaagtttggtgattttattatttttagtaattgtgatgtagtaataataagaatagttatgtttattgtttattgaaggtatatgatgagttagatattgtgttggtatatgtgatttttggaggtaatatatttttttttaaggaggaaatgattgagttttggagggagggttttttatttggttttaggtttttttttgatttgtgtttttttttttttttttgtttgttttattgtagtttttttggtttttttgttgtttttggaatgtattaagtttgtttttagtttagtttttgtattgttggtttttttttgtttttttaattttaatttagttgttattatttttgtgattttttattatttattttaaagtagttattagttattttttatgtaattattttattttaatttttattatagtttttagttttattttgatagtttttagaattgatgaatttattgattttgtttttttttattgtatgtaaattttaagaaataagagtttttgtttgtttattgttgtgttttagtgtttgttatagtatttggtatgtagtaggtgtttaatgaatatatttttaaaagaatgaatgattggaaggagtttgaaagaatgatggtttgtgttaatagtttatttttaatttttttagatgggatggagattattattatgtaattatgatttttttgagtttgtgtggtggttgatggtaggtgttagtttggttggattaagggatggttggtaatgtattgtttttgggtgtgtttgtgagggtgtttttggaggagatgggtatgtgagttggtgggttgagtggtaaagatttttttttaatatggatgatattattttattgttagataataaaaaggtagagaaaaggtgaatttttttttttttttggaggtgggatgttttttttttttgtttttggatttagaatttttagttttttagtagttttttaggtttttaaatttttggttttaaattaagagttatattaatagttttttagttttgaggtttgtagatttggattgagttatgatattggtttttttgggtttttagtttgtggatggttttttgtggtatattttggtttttataatggtatgagttaatttttttaataaatttttttttatttatttattatttatttttttaattgtttatttgtttatttatttatttatttattatttattttttatttatttatttattatttatttaattaatgtatttatgtttgtttgtttattggttatttatatttatttattaattatttatttatttattatttatttgttatttatttagttatttatttatttatttatttattttttttttttttttgagatggagttttattttgttgtttaggttggagtgtagtggtgtgattttagtttattgtaatttttattttttaggtttaagtgatttttgtgttttagttttttgagtggttgggattatagatatgtattattatgtttagttaatttttttatttttagtagagatggggttttattttgttagttaggttggttttaaatttttggttttaagtgatttattggttttagtttattaatgtgttggttattataggtaagagttattgaatttaatttattatttgtttgtttgtttgtttgtttgtttgtgtttatttgtttgtttggttatttattatttatttatttatttgtttgtttgtttgtttgtttgtttgtgtttgtttgtttttatttttttgtttgtttgtttatttagttatttgtttgtttgtttgtttgtgtttgtttgtttttttttttttttgtttgtttgtttgtttatttagttatttatttatttatttattttttattggttgtttttttggagagttttggttgatgtagatggtgttttggtaagtttaggttgttatttagattattgtggagggagtgatttaaataatagatatgtattttttagtttgagaggtttaaagttttggattaaggtgttgttagggttagtttttggtgaggtttttttttttggtttgtatttatttttttgttgtgttttttgttattttttttttgtttataagtgaggggggaggagagatttttggtgtttttttttttttttataaggatattaattttattagattagggttttgttttatgattttatttaattttaattatttttttaaaagttttatttttaattatagttgtattgggagttagggttttaatgtaggaatttaaggggaagggtatagtttggtttataataaatgggaaattatgtttatgattaaattttttagaagatatggtttattagtgttgttaatgattgtaagtaaaggttagagaggaaaggggtttttgtggggtggggggtggtgggggtagttggtgttgggaataaggtttttttttttgtttaatagtagggaagtgaggttggttgtagatgttatttggggtgggaagagaggggagtttttgtttgtatattttgtgtgggttttggtttgatttttttttgtgttttttattttttgtgtttttttttgtgtgggagaaatgttgatttttgttggtttaggtgtttaggtttttaggtttgttggttttgggttgggtttaattaatgagaggtttgggaggaatttgggaggtggaagtaagggagggtgtgggagttttttattttttttgttttagatagtttttttagtaggagaggtggttttttgtgtagttttagtttttgttagagttttatttttgtttgggtttttagtaggtgattttggtttttggattttggttataggatttttttttttttatttttatttaggggtggtggtggtattttgttgttaatttttaggttatttttataatgttaagaattttttttttatttgtatggtttttttttaaggtattgagaagggttttaattatatgtttatagggttaaatattttttgtaaaatttataaaatggaaaatattttttttataattaattaatgtttttgtttatttttagttttgagtttttgtttgttatatttttttttgtgtgaggtggaaatggaggtttgttgttatgtgggggtttttgttaaggagaagttgaattggaaagatatttagtttggttttggttgggttatatttatgtagtttttatttatttttatgtatagtttagttattgtttgttattttggtgtggaaatggattttagtaatatttgttttatttattgttttaattttatttattgtgtagaattaaaaattataagatatgaatatattttgtggtgtttggtgttggaaaaatgtgtgtagtggagagaagtaagatttgaaatgtatgggtttagaagtaaatttgtggaaaattatttttattattagaggtgaagttgtaagtaaaggatttagtttttttaatgtggagttaaaatagaaaagtttttttggttagaaatatatgtataaatgttttatatgtagttagaaattttttttatttttttattttttttttgatgggaattatatttaaaaaaaaagaaaaaaataggatttattagaatttttgtgtattttgaataaaataattgtagtagtattattaattttatgttgattgttatttttgtatatattttaattattaaaaataaaaataaaatttgattaattaaggagatttatttgttttatttatttatttatttttgagatggagttttattttgttgtttaggttggagtgtaatggtatgattttggtttattgtaatttttgttttttgggtttaagttatttttttgttttagttttttaagtagttgggattataggtgtgtgttattatatttggttaattttttatgtttttggtagagatggggttttattatgttgattaggttggttttaaatttttgattttaagtgatttgtttattttaattttttatagtgttggaattataggtgtgagttattatgtttagtttatgtttttttttgttgttttttttttttttttgagatatggttttatttttttatttaggttggagtgtagtggtatgattatggtttattgtagttttgattttttgggtttaagtaatttttttattttagttttttaagtaattgggattataggtgtatgttattatgttttgttagtttttgtatttttagtagagatggggttttgttatgttgtttggattggttttgaatttttggttttaagtgatttatttgttttggttttttaaagtgttgggattataggtatgagttattgtgtttagtttgattagttttttgtttttgaaatagaaaatgatattataaagttattatattgaagaagtaatgttaaaaatgtgggagaaatagaattttggagatatgattgatagttgattggtatttttttgtatgtagtgatgtttgtgatatttaatagttgtttataatttataatttgttgttatttatttttttattttaaatgaattattgtatttatatttttagagggttgtataagtttatattattttgattttttgttgattgtttttttgttttttgtttggtttttattttttttattatttgtgtaattagttttttgtttttaagtttttttgttttaaatgtttaagtggattaggtattgtggtttttgtttgtaattttagtattttgggaggtttaggtaggaggattatataaatttaggagtataagattaatttgggtaatatagtaagattttgtttttatatatatataaaaaatataaaaattagtaaggtgtgatggtatatgtttgtagttttagtattttgggaggttgaggtaggaggattgtttgaggttgggagtttaggattagtttgggtaataaagtaagattttgtttttataaaaataaaagaaaaaattaggtaggtatatagtgtgtatttatagtttgagttatttgggaggttgagaagggaggattgtttgagtttaggagtttaaggttgttatgagttgtgattatattattgtattttagtttgtgtgatagagtgagattttgttttgggaaaaataaataaataaataaataaataaataaataaataaatgtttaagtggtttttattttttggttagattttattatatattttatgaataaattgtatgtatgagaaaggtgagtagatgaatagggtagggttagggggttaaggggaagattatagattatgtggagtgagattagtggttaaaaattgttaattatagttaggtttggtggtttatgaaggtaattttaatggttgggtttggtggtttatgtttgtaattttagtattttgggaggttgatgtgagtttattatttgaggttaagagtttgagattagtttggttaatgtagggaaattttgtttttattaaaaatattaaaattggttaggtatggtggtgggtgtttgtagttttagttatttgggaggttgaagtaggagaattggttgaatttgggaggtggaggttgtagtgagttgggattttattattgtattttagtttgggtgatagagtgagattttattttaaaaaatttaaaaaaaaaaaaataaaaaattgtagattttaataaggaagagttataggatgatattttaggatgtgggaaaaggttatgttagttttggattttttttgattaatgggtattttagttattaaaggggtagatgtgttttatttaatttttatttagttattagagtataatatagggatgtgttatagatagagatggagattaataggtagaggggtgatggggaggaagattgaggtaagaggaataaaatggggattgtagagggtaggtggtaggagtttgagggttttagaagaaattgttgtataagtaatgagttagtagggtgagtgatggttaggagaggtggtttaagaaaataaagagatatttttgggggtatagatgtgttttgaggggttgaggaagagatggggaaggggtggttttgtggatttttggtatgattgttgtggtgaaaaggaattaaagattttgataaggggatgattttttaaataaggaagttttgggtttttgtagggggattagtagattgagggtaaatggtattttgtttattaaagttttaataaaatgttaaggtaagaatatttgtttggttttgggggtaattttagaaatattagaaaagggatttattatgtgtaatttttttttaattatttggagaaatgtatggttatttaagatagagaaaggtagttaaagtaagtggaggttaggtatagtgatttatgtttgtatttttagtgttttgggaggttgaggtaggaggattgtttgaggttggaaatttagtattagtttaggtaataataaaataagattttgttgttataaaaataaaaataaaaattttttgagatggagttttattttttttgtttaggttggagtgttgtggtatgattttagtttattgtaatttttgttttttagatttaagtaatttttttgttttagttttttgagtagttgggattataggtatgtgttattatgtttagttaattttgtagttttagtagagatagggtttttttatgttggttaggttggttttgaatttttgatttttttggttttttaaagtgttaggattataggtatgagttattgtgtttggttgttataaaaattttttaaaaattagttaggtatgttaggtgtggtggtttttatttgtaattttagtattttgggaggttaaggtaggtggattatgaggttaggagtttgagattagtttgattaatatggtgaaattttgtttttattaaaaatataaaaattagttaggtgtggtggtatatgtttgtaattgtagttatttaggaggttgaggtaggagaattgttttaatttaggagttgggggttgtagtgagttgagattgtattatggtattttagtttgggtaatagagtaagattttgttttaaaaaaaaaaaaaaaaaaaaaattagttaggtatgtagtgtatatttgtagttttagttatttaggaggttgagaagggaggattaattgaaattgggaggttgagattgggaggttatgattatgttattgtattttaatttgggtaatatagtaagattttgtttaataataataataataaataatgtaagtgggtataagaatttatttatttatttatttatttatttatttatgagatagggttttattttgttgtttaggttggagtgtattggtgtaattttggtttattgtaagttttgttttttgggtttatgttatttttttgttttagttttttgagtagttgggattataggtgtttgttattgtatttagttaattttttgtatttttagtagagatggggttttattatggttttgattttttgattttgtgatttgtttgttttggttttttaaagtgttgggattataggtgtgagttattgtttttggttttaagaatttattttattttagtattttggaggttgaggtgagtggattatgaggttagaagattgagattattttggttaatatggtgaaattttgtttttattaaaaaaatataaaaaattagttgggtgtgggggtgggtgtttgtagttttagttatgtgggatgttgaggtaggagaatggtgtgaatttgggaggtggagtttgtagtgagtggagattgtgttattgtattttagtttgggtaatagagtgagattttattttaaaaaaaaaaaaaaaagaatttattttaagatagtaagttttagggttgaagttagtttttatttagttttaggtttaaagttataagtatggttattgtaatatttttatttaggatattattttttaggggtttagatttatattattaaggaggagtgtttatattagtagttggggagagggtggttttttataagatgtaatgtttattttgaagagttattatagtgataattatgaaatttatgtttgagatttaattttaagtgaaaagaatagaatttaatatttattttatggggagtataaaattttgaaaatatatgttttttataattaaattaaattttatgttatgtttttgaggagataagtattgaatggaatatagaagaaatgttatagttaatgattgttgaagttttttttttaattttttgtttatgttgtttggtaataagtaatatagaaaattgataataaaaagtaaaagagaaagaaaagatatagtgtatagtttagattgttttttttaaaaaattaaataataataataaaaagtataggttgggtgtggtggtttatgtttgtaattttagtattttgggaggttaaggtgggtggattatttgaggttgggagtttgagattagtttgattaatatggggatattttgtttgtattaaaaatataaaattagttgggtatggtgatgtaggtttgtaattttagttatttgggaggttgaggtaagagaattgtttgaatttgggaggtggaggttgtagtgagttgagattgtgtttttgtattttagtttgggtaataagagtgaaattttattttaaaaaaaaaaaaaaaaaagtataaatgtaagttgggtgtggtagtttatgtttgtaattttagtattttgggaggttggggtaggtggattatttgaggttaggagtttgaaattaatttggttaatatggtgaaattttatttttattaaaaatataaaaattagttaggtatggtggtgtgtgtttgtaattttagttatttaggaggttgaggtaggagaattgtttgaatttaggaggtagaggttgtagtgagttaagattgagttattatattttagtttgggtgatagagtgagattttgttttaaaaattaaattaaattaaattaaataaaataaaaaaaagaagtggtataatataaagttttggtagttaaagtgttaatttttagttattaggaaggttttgttatttaatgatttattgttttagttaaggttagttatattttgggtttttgatgttggaggtaatatgatgttaatattggtgagaaatttattatttttttttttttgttttttggtgttggtttttgtgtgtatttgtagtttttttattattggtgtttttatggtgtttatgttattggtttattttttagtaataatttgatagtttgatatttttgtagattttgtggttatagagttaaagttttttgttattagtgggttttgtagataattttttaaatttttttgggttgagttagttaagtttttaataagttggaagatgataggggttggatgtaatttatttttaattggtttgggttatatggatattattttttttttgggatttgatttgggatggaaataggagttatagtttatgggaaggttgtgaaaggaagttttggttttagggtgtggattaggttgatttgtggaataaggttttaggggtggtttatttgtttgttttgtttagttttttttggtaattatatttatttggggtttattttaaatttggtaggtaatgttgttgtttttattttagttgttgttttaatatgttttgtttggttaggataggtgtttaggtatggtatttagggatatttttggtttttggggtttaatttttggtttttaggtgtagtgttgggaaaagtagagggttttggttatggtgtaggttttgttataggttatttaagtagtttgggaggagttggaaagagagtaatgtatttatttggatagagattgaagttatatttttattgagaaaagatgatatttttgtttggattttttttttgaaattttaggttggggtggggtaggagttagtgagagagtttagtgttttaaaggggattttttggttttttgtgttttttaatttagtatttttggggatttatatatttagggtagagtggttatttagggttttttttatttagatataaaggttattgaaggttttgggttaatattgttttgaggatgattagtgatttgagtttttgttagagatagtaggtagtttgggtttaagggttgtttagtgatttgaagttgggattattttatattttttgtgttatttttgttttttgttttggaggtttttaggttgttaatagttatgttttggagaattaggttagattaggttgggaataaagtttagttgttatagagttgttgagaggttattggtaagtagtgtttaggagttgttttttttttgttagtaatagtttaatgtttttttttataggggttgtaaatgggtttatgtttagggtggggttagggagataaagtagagagaaattgggttgggagtagagagtgttatgttttattttggagatttaaggttaggttattttgtagagttggtgtttagagtttttagtgtataggagaggaggtaaatagaatttgatatttagtagtgtttggtagatgtttttggaatgaatgattaaatttatatggagagttgaaatgggttaggaattttagggagatgggtagtttatagtttagtagggttgttttagtagagtaggttaatgttaggttttttggtaaattttttggggtttaggtataattgttatattaggaaaggggtaggggtgattagtttattggttatgggggtattttattgtttttatagaagtttggtatttataggtttgggtgatatatgatttttatgtttggtattatgatggttgtttattaagtttttttatttattaggattgattttttttggttagtgattttagattattatgatttggtagttgttgttaggtttgtttggttaaggatttttttggagattgagttattttatatagtaaagtgagttatggggttatagtgttgtgtgttgtgtataagttttgagggttttatttagggattggtatttattgatttttataaatttttggtaattgtttagagttgggatgtttttaaggtaatagttttaataaatagaggtgtaggaatttagtgtgttattttttgttttattttaaaggtttatatttttaggggtttggagtttttttttggagttttttttattttaaagttagttggatttgtttaggaattgttattattattttttggttgggtttgtattgatgtgtattgaattttttttattaggtttattttaggtaaattttagagtttatgtaatattgtttgtggataaatattggggtggaaataggggttatttttaggttttagttatatggggttgttagggttgtttgggatggtaggagagtgttagaggagggtagtttaaggattaggtagggggtgggaagtgtttttttttatgggtttttaagtgagatgttttttgtaaatatttatttgggatttttaagtagagggttggtttttatgttatttggatttggattttagattattgtttttaagtggtaattttgggtttttttgtatttgttttggtttgagttggttatatttgtggggggtggttttaggaagaaggtggattgttgtaaatgtaatgttttgttgttaggtgtattgtttttggttattagaatttttttgggtaggttggggagatttgatgggtaagtgtttgtggtttggtgtgagtgggtagggtaggtggtttttgtttgggtatgtttttttatttttgtaatagattagggagagggttggttttaggatttaggtttagttagttgttttataattgaggggttttggtggaggatataagttagatagagttatagattaattgtatgaggtggttttttttttttagtttaggttttttgaatgtgttagagtagataagtttggatgtgaggaggtaagaggtagtgagaataggtgtggagatggggttgggggagaagaggaagaaattttgtgtttgtgttttttttatgtttgtttgttattgggttagttgattggggaagtgttttttgagggtgtaattttttgttttttttgtaagttagtttttggggtgttgggtgagggtgtagttttgtttattatggtgagttagtatattgaattatggtagaagttgttttttgtgtgggtgtagtttttttttttgtttaggatttagaagttatgatagtatagagttttttaattgtggttggtgtttttttaggaattttttgaaagttatagagaaattttagagtggttgggtatggtggtttatgtttgtgattttagtattttgggaggttgaggtgggtggattatttgaggtttggagtttgagattagtttggttagtatggtaaaattttatttttattaaaaaatataaaaattagttgggtatggtggtatatgtttgtaattttagttatttaggaggttgaggtatgagaattgtttgaatttgggaggtagaggttgtagtgaattgagattgtgttattgtattttagtttgggtaatagagtaagattttattttaaaaaaataaaaaataaaaaaagaatttttagagtaatttttaggtgttagtaggggtgtgatgtaattttagttttgtttttgtggtttattggttttgggtaagtttttttgttgttgttatttatagagagtttttaggggagtttgggaatgatggtaagttttatgtgatttagtatgtaaagggagttttaaaatttagaatttagagagttagggtgggtatagtgtagttggttttagtgttgaggggttgggggagagattttgtattatgttttgattatagtaagggaagattatggaggtttttggaatgttttagtaatggtgtaattttagttttttttatttttttgttaatgataattatgattatgatagtagttaataggttatagagtaggtattttttagtttttttaaatatgaatttgtttaatttttataataatatagtattgttttatttaataaatgaggtaggttgggtgtggtggtttatgtttgtaattatagtattttgggaggttaaggtaggtagattatgaggttaggagtttgagattagtttgattaatatggtgaaattttatttttagtaaaaatataaaaattagttgggtgtagtggtatgtttttataattttagttatttaggaggttgaggtaggagaattatttgaatttgggaggtggaggttgtagtaagttgagattatgttattgtattttagtttgggagatagagtgagattttgttttaaaaataaataaataaataaaattaaaaaatattatatatataaaaaaataaatgaggtaaatgagatgtatgaggtgagaattttgtgttatagggagaggtgtagtttggtgagatttaattttaaggggttggtggttttgagtttttaagtgtaattattggattatattgtttgtagattattattatttttattttattggaaggttgggtgaggtaattgggaaagtttggagtagtagtggagttgttagagagaatttgtttttagtgtttttttggattttgtagttgttttgtgtgggtttttgttgttttttgtattggaaaagatttttttatagatggggttttatgatgttatttaggttggagtgttgtgtttatttttaggtgttgttatagggttgtagttttgaatttttggttttaagtgatttttttgttttagttttttgagtagttttttgggtttaagtgatttttgtgttttagttttttgagtagttttttgggtttaagtgatttttgtgttttagttttttgagtagttgggattttaagtgtatttggttaagtttttttttattttttattatttaagatttttttttttttaaggtttagtttaattttatttttatttaaaatttttggggtatttttgtagtatttggaggttgaattgtttaggagggaagggtgttaatgagttggtgttttgtttttattttgatttttggtgagaatgtaagttttttgtaggtaaggattatattttattattatttttgtatttatttagatttggttatgtgtgtttagtatataaagtgtttttgatgattgtttatagatttatggtatttgagattgttttaatatatttttttaaaattttttttttttttagaggtttatgaatgtttaaattaggtttattgggaataatattatggttattttgtttattttgaagtttatatataggtttggaagtaataattttgtatagtttagatgaaaaaataaagatttttttgttgtttttggattgttagagttttgggggatttttaatattttttgttgttttttttaattttatggtgttgatggtttgttggggggttagtttgatttttgtgagtgtttgtatttggaaaagggttggtgttaagatagttttaggatatttagaatgagggtaagaggttatttttattattagttttttttagttttattttatataattgtaatatagtgatttagtatattttgggttattgttaagtagggagtaaattagaaatggtttgagttttttttttttttatttttagaggggtttgtttttttaggtaaatataaggaggtattgaggttgttgtataagagttggtttttgtttattttataaattttatttttatttattgtaaaaggttttgtttttttttttaaaaaaaaaaaaaaaaaagaaatttagtgaggggtggggtaggtgtgtgtggaggagaggagaaaaggataagtgatggtttttttattttttagtaagttgtaggtgtagagattttaagtttgttttagggtttttttggtatttgtgtaggagggtttttgtagaaaaaatttaggatttatgatttgggaggattttggttatttttattgtttggatttattagtgggaggtaaagtgtaagaaattaagggtaaagggttttttttgggtgggttagagattttttggaaagggttatgtattgtgtgatttttataataattttaagtatttggagtatgttggggaggaagttttggtgttaaaattaagtatgtgttatttggaagtttgtttttgtttattagtatattaatttatttatgtttttgatagagttgtgttttgggtgtgtagagggttattttgtttgtaataattgggtgaaagttgaaattttaagttattgatttagaagggtatttttggggaagttttgagtaattttttttgagataaggtattttattatttattttggtttttaaatatggaaagttagaggaaattgataatggtttaaaggtagggggatggttttgatgatttttttatttttaattaaggtttatgattttgtttttttattaataaaaattaatttatggatttttggtaggtatttttttatttgaatgaattaaaggagggatattaaataaatggtttttagatttagaagaggagatgttatttataatttgaggattgaggaggataaaggattttgtttgtttggattttttggagaaaattataaaggaaaaaaaaaaggaaggaaaagataaataatgaagatttggattttttttaatttgtttttgtggttttggtgtgtttatttgtgaaatggaattttagagtgttagagtgggagttttttatgaaatgaaagtttttgaattggtttatggtgaggtttaagttaggttttttttgtttatttaaggtgggttttgttagggtggagtgaggatgttagttgtgggtggtgttttgagtgtaaaatgtgaatttgagttgttaagtttgggtgttgttggatggttttatttggaggttgttttgtgttttattaagtagaggagaaattgaagagaatttgaagaaaggatgttgtggtttggattattagttttagaggttgaatttaaggatatttttttatttagttttgattttatttatttatatagatgtatagggatttaaagtatttggttgatttggaaagttagtgatttttgtgagggtgtaaggggtgaggaagagggagtgttttttagggtagtttttttgatatttgagtaagggttggagatagtgtaggggatggttggtttaggttgaaagtggtttgatagtggttttgttttgggaggaatttgatttgtagtgtgtttgttgtggggatttgtttagttttgggggtgttttgttatttttggttgtaggtatttaggtgagtagtgttggttttgggatattgatttttttttattttgggtgtgaagtttatttgagtaagatttttttatggtgtttttgtggttgttgtttttaggaaagtgtggtggtgaggtagtggggtgtgtgtttttagggtgttaattttgggttggtagtaggaaggtgggaagagggggtggtttgttgtttggagtgtattgattgggttttgttttggttttgtttttgttttgtttttttttggagatgtgtatagaattttggtttagttggttgtggttttgtttttgatttgttttttttttgttttgtgaatgtgtgtgttgagttttatttttgtttatttttgtgttgtgttgtatttggtggagtggggttggtgggtgttgggtttgggagggggtgtttttgtgtggtagtgtagattagattagattaggttaggttgggggtgggggttgtttgtgtggtttgttgtgtttgtagttttgtatttttagttttttgtgttggtgttaatggttggttttgggagttgttgtattttttagttttgagtttgggtggggtgggtttggttaggtggaagtgggtggaggtgtgggtgttttgggtggttttgttgggtgaggtggtggtgttgggtattgtggtggtgttgggtatagttgggggttggagttggggtgttggtttagtgggttggggtagggtgggataggatatttgttttgttatttttttggtaattaaaagggtagagtgtgttgattgagttggagttttagtttttttatttgtaaatgggtgtgttggatagatgattatttgttttttttgtgttgggtattgtgtgtagtttggtgtattggtgtagtggggtagatatagggagttgttttttataatttgggtaatg

SEQ ID NO: 12 - DNA, 1405 bp, Artificial Sequence
  chemically treated genomic DNA (Homo sapiens)
tgttatttgagttgtaaagggtggttttttgtgtttgttttgttgtattgatatattgagttgtgtatggtgtttagtgtagggagaataaatgattatttgtttaatgtgtttatttataggtgaggaaattaaggttttaatttaattgatgtattttgtttttttgattattagaaaagtagtaggataggtgttttgttttgttttattttggtttattaagttggtattttggttttgatttttggttgtgtttggtgttgttgtggtgtttggtgttgttgttttgtttggtggggttgtttggagtgtttgtatttttgtttgtttttatttggttgggtttgttttgtttggatttgggattgggaagtgtggtgatttttggaattagttattggtgttagtgtggggagttgggggtgtagagttgtgggtgtggtgggttatgtaggtggtttttatttttggtttggtttggtttggtttggtttgtgttgttgtgtgggggtgtttttttttaggtttggtgtttgttagttttgttttgttaggtgtagtgtagtgtaggggtgggtgggggtggggtttggtgtgtatgtttatggggtggggagggggtgggttaggggtgggattatagttggttgggttggggttttatgtgtatttttggggaggggtggggtgggggtggggttggggtggggtttggttggtgtattttagatggtgggttgttttttttttttgtttttttattattggtttaggattagtgttttgggagtgtgtgttttgttgttttgttgttatatttttttgggagtggtggttatggaggtattatgaagaagttttatttaggtgggttttgtgtttggggtggggaggggttggtgttttgggattagtgttgtttatttgagtgtttgtggttgggagtggtgaggtgtttttggagttgagtgagtttttgtggtgggtatattgtaggttgagttttttttaggatagggttgttgttgggttgtttttgatttgagttgattgttttttgtgttgtttttagtttttgtttgagtgttggaggggttgttttgggggatgtttttttttttttgttttttgtatttttgtaggaattgttgattttttaggttggttgggtgttttgggtttttgtgtgtttgtgtgggtgaatggggttggggttaggtggaggggtgtttttgggtttagtttttagggttggtggtttaggttgtagtattttttttttggattttttttggttttttttttatttagtggggtatgggatggtttttagatgggattgtttagtagtgtttaaatttggtgatttgggtttatgttttgtgtttaggatgttgtttgt

SEQ ID NO: 13 - DNA, 1405 bp, Artificial Sequence
  chemically treated genomic DNA (Homo sapiens)
gtgggtggtgttttgagtgtaaaatgtgaatttgagttgttaagtttgggtgttgttggatggttttatttggaggttgttttgtgttttattaagtagaggagaaattgaagagaatttgaagaaaggatgttgtggtttggattattagttttagaggttgaatttaaggatatttttttatttagttttgattttatttatttatatagatgtatagggatttaaagtatttggttgatttggaaagttagtgatttttgtgagggtgtaaggggtgaggaagagggagtgttttttagggtagtttttttgatatttgagtaagggttggagatagtgtaggggatggttggtttaggttgaaagtggtttgatagtggttttgttttgggaggaatttgatttgtagtgtgtttgttgtggggatttgtttagttttgggggtgttttgttatttttggttgtaggtatttaggtgagtagtgttggttttgggatattgatttttttttattttgggtgtgaagtttatttgagtaagatttttttatggtgtttttgtggttgttgtttttaggaaagtgtggtggtgaggtagtggggtgtgtgtttttagggtgttaattttgggttggtagtaggaaggtgggaagagggggtggtttgttgtttggagtgtattgattgggttttgttttggttttgtttttgttttgtttttttttggagatgtgtatagaattttggtttagttggttgtggttttgtttttgatttgttttttttttgttttgtgaatgtgtgtgttgagttttatttttgtttatttttgtgttgtgttgtatttggtggagtggggttggtgggtgttgggtttgggagggggtgtttttgtgtggtagtgtagattagattagattaggttaggttgggggtgggggttgtttgtgtggtttgttgtgtttgtagttttgtatttttagttttttgtgttggtgttaatggttggttttgggagttgttgtattttttagttttgagtttgggtggggtgggtttggttaggtggaagtgggtggaggtgtgggtgttttgggtggttttgttgggtgaggtggtggtgttgggtattgtggtggtgttgggtatagttgggggttggagttggggtgttggtttagtgggttggggtagggtgggataggatatttgttttgttatttttttggtaattaaaagggtagagtgtgttgattgagttggagttttagtttttttatttgtaaatgggtgtgttggatagatgattatttgttttttttgtgttgggtattgtgtgtagtttggtgtattggtgtagtggggtagatatagggagttgttttttataatttgggtaatg

SEQ ID NO: 14 - DNA, 2365 bp, Artificial Sequence
  chemically treated genomic DNA (Homo sapiens)
gtggttgtggtgggggtgttagttgtaggggtgtttttggtgggtgggagttggtggttttttgttggtgttatgggatttgtatgtttgttttgtgttttttggtttttgagtttataggttgggattttgtttgttagttgtgtgtgttgttgtttaatttttgtaggtgtagagtgtgtggtggtggtgatagagaattttgtttggttgtttaaatatagttttttgtagaaggattttgtgtttggggaaggggaggaatttttttttttttgggtgtttgttttttttgttatggtttggtttttatatttgtttatatttggttgtagtggggtgtttggggggaggggttgaggttgtgttttttgttgttttttgggtgtgggttaggtggggaggaggggggtgttttggttgtgtgtttaggattgttttttagtggttatttgggttttagttttttaggtttggttttgataggtgggtggagtagttagtgtgagatagggaggttggtgtgggtgtgggaatttgatttgtttgggaggtgggggtggggtgggggtgtagtgtgtggggaggggttggtgtttgttttttttttttatttatttagttgagttagggggtttaggggtttttttggtggttagttttgtattgtaggagtgtgggtgtggtgttttagttagtgtgtagggtttgggttttgttgggggtgtttttttgttgttgttttttgtgtgatttgttgtttattagttattatgttggattttgtggttaatgtgtagttggatgggattattttggattttgaaggtgggtgttgggttggttgttgtggttgtggatgtgttggagaggattttgtgggtgggtttggtgtgggatgggggtgtgttgaggggagatgggagtgtgttgaggggagatgggatttttaatttaggtgtttttttgttgagagtgttgtgtgtttttggttttgtgtttgtgttgtttatgtgggggattttgttaggggtatttgtgtagattttgtgtgtttttataggattttgtgtttgttttgtgtattgttgtttgggtttttttttttttattgttgtttgtgtttgttaagtgatagtgatttttttgagggtttgtgaggttgttttggaattttttaggatgtatagttttattttgggaaatttattggttttttttttttggttttttttggtggtttttgggttttgtttggatttggtaatgggatagggaggttgttttttatttttgattgagtggatagttgtgttttgtttgggtggatagttttttttttttttatgttagttttggggttgttaagttgtgtagtttgtgggttgggagtattgaatggatatagtttaggttgtggtagggtttagagtgggatgttttatggtttttatttaggtttggggatatttttatttgttttttagaattgggttgtgggggatagaaggggtttgtgtgtgggtagggagagtattttggtttttttttgtttttggggtttataaagtgtgttgggatttgtggggttgttttgtttaagtttgggtttggtgtttgtgtttttgagtttgtgagtgtgtgtgtttttttgtgtttttttgattgttggtgttggggttttgtgttttgtgtttgtgggagtaaatatagtaggtgaaggggaagtttatataatggtttttagtgttttggggtagggtttttgaggggtgggtttgtttttgttgggatttggagtttttgttttttggagaggtttttaggttgatttgggtagagttttttggtgggttgggagggggaaaggttgtgttgaaatgagtaaattgtttaggtgttaggttaagttgggaggtgattagtttgaggttttttttgttttatggttagaattagggttgatatttgggtgttttgagtttagttgtttatatggtttatttggggttagttttatttgagtgggggaggtggggttttttgggggattagaattttggttggatgttaagtagagtgttagtggttgttttttagggttgggtttgaggagggtgtggggtggtgaagggatgggagggggttgtgatttagtggttattggtgttgtgtagagtgtgagttggaaatattgtagttattttgttagtttagtggtgaaagtttttttttaggttttatttttttgtatttttgttttttagagggaggggaggtttgggtttgtagagttgggagggtttgttgtttttgttttttttttttataatatttttttatttggatatttttgggtatatgt

SEQ ID NO: 15 - DNA, 2365 bp, Artificial Sequence
  chemically treated genomic DNA (Homo sapiens)
gtatgtgtttaaagatgtttagatgaggaggtgttgtgggggaggggggtgggaatagtaagtttttttagttttgtagatttagattttttttttttttgggaagtagggatgtaaagggatagagtttgaaaaagggtttttattattaagttgataaagtaattatgatgtttttagtttatattttgtatagtgttagtggttattggattataatttttttttgtttttttgttgttttatattttttttaggtttagttttgaagaatagttattggtattttgtttggtgtttagttaaagttttggttttttaggaggttttgttttttttatttagatagggttgattttaggtgggttgtgtgggtagttgggtttaggatatttagatgttagttttggttttggttatggagtggggaggattttaggttggttattttttagtttggtttgatatttggatagtttgtttattttaatatagttttttttttttttggtttattagagggttttgtttaagttagtttaggagtttttttgaggggtgggggttttaggttttggtagaggtaggtttgttttttagaagttttgttttagagtgttggagattattgtgtgagttttttttttgtttgttgtatttatttttgtggatgtaggatgtagagttttagtattggtagttaagaggatgtaggaaagtgtatgtatttataggtttagagatgtggatgttagatttaggtttggatagagtagttttgtaagttttaatatattttgtaaattttgaagataggagagagttaaaatattttttttgtttgtatgtaggttttttttgttttttatggtttgattttgggaggtggatgaggatatttttaggtttggatgggggttatgggatattttattttagattttgttatgatttgggttgtgtttgtttggtgtttttggtttatgggttgtataatttggtggttttgaaattggtgtgggggaggggagggttgtttatttgagtaggatgtggttgtttatttagttggaggtgaggaatgatttttttattttgttgttgggtttaagtggggtttgagagttgttggggagagttaaagggaggggattgatggattttttagagtgaaattgtgtgttttggagagttttgaggtagttttgtgagtttttgaggaggttgttgttgtttggtaaatataaataataataaaaggaaggaaatttaggtggtagtgtgtagaatgagtatagggttttgtgagggtgtgtagggtttatgtgggtgtttttaatagggttttttatgtaggtggtgtgggtatggggttgggggtgtgtggtgtttttagtgggagggtgtttggattaggggttttgtttttttttagtgtatttttgtttttttttagtgtatttttgttttgtgttaggtttatttgtagggttttttttagtatgtttgtggttgtagtagttagtttagtatttatttttgaagtttgaaatgattttatttagttgtgtgttgattgtggggtttgatatgatggttggtgggtagtgggttgtgtggagggtagtggtgaggaagtgtttttggtggggtttgggttttgtgtgttggttggggtgttgtgtttgtgtttttgtagtgtagagttagttgttggaggagtttttaggttttttggtttagttgaatgaatgggggaggaaggtgggtgttggtttttttttgtgtgttgtgtttttgttttgtttttgttttttgggtggattaggtttttgtatttgtattggtttttttgttttgtattggttgttttgtttgtttgttaaggttaggtttggggggttggggtttgagtggttgttgggggatagttttgggtatatgattggagtgttttttttttttttgtttggtttgtgtttaggggatggtgagagatgtggttttagtttttttttttgggtgttttgttgtggttagatgtgggtggatgtggaggttgggttatggtgaggagggtgggtgtttagaggggaagagatttttttttttttttgggtgtagggtttttttgtaggaggttgtatttgggtagttaaataaagttttttgttattgttgttgtgtgttttgtgtttgtaagggttaaatggtagtgtatgtggttggtaggtaggattttggtttgtgggtttaagagttgaggggtgtagggtgaatatgtgagttttatggtattagtgagaggttattaatttttatttattgagggtatttttgtagttaatatttttattatgattat

SEQ ID NO: 16 - DNA, 3791 bp, Homo Sapiens
gccttcctactaccggcccaggattagcgccctgggagcgcgcgccccgctgcctcgccgccacactttcctgggagcggcggccacggaggcaccatgaagaagtcttactcaggaggcacgcggacctccagtggccggctccggaggcttggtgactccagtggcccagccttgaaaagatcttttgaggtcgaggaggtcgagacacccaactccaccccaccccggagggtccagactcccctactccgagccactgtggccagctccacccagaaattccaggacctgggcgtgaagaactcagaaccctcggcccgccatgtggactccctaagccaacgctcccccaaggcgtccctgcggagggtggagctctcgggccccaaggcggccgagccggtgtcccggcgcactgagctgtccattgacatctcgtccaagcaggtggagaacgccggggccatcggcccgtcccggttcgggctcaagagggccgaggtgttgggccacaagacgccagaaccggcccctcggaggacggagatcaccatcgtcaaaccccaggagtcagcccaccggaggatggagccccctgcctccaaggtccccgaggtgcccactgcccctgccaccgacgcagcccccaagagggtggagatccagatgcccaagcctgctgaggcgcccaccgcccccagcccagcccagaccttggagaattcagagcctgcccctgtgtctcagctgcagagcaggctggagcccaagccccagccccctgtggctgaggctacaccccggagccaggaggccactgaggcggctcccagctgcgttggcgacatggccgacacccccagagatgccgggctcaagcaggcgcctgcatcacggaacgagaaggccccggtggacttcggctacgtggggattgactccatcctggagcagatgcgccggaaggccatgaagcagggcttcgagttcaacatcatggtggtcgggcagagcggcttgggtaaatccaccttaatcaacaccctcttcaaatccaaaatcagccggaagtcggtgcagcccacctcagaggagcgcatccccaagaccatcgagatcaagtccatcacgcacgatattgaggagaaaggcgtccggatgaagctgacagtgattgacacaccagggttcggggaccacatcaacaacgagaactgctggcagcccatcatgaagttcatcaatgaccagtacgagaaatacctgcaggaggaggtcaacatcaaccgcaagaagcgcatcccggacacccgcgtccactgctgcctctacttcatccccgccaccggccactccctcaggcccctggacatcgagtttatgaaacgcctgagcaaggtggtcaacatcgtccctgtcatcgccaaggcggacacactcaccctggaggagagggtccacttcaaacagcggatcaccgcagacctgctgtccaacggcatcgacgtgtacccccagaaggaatttgatgaggactcggaggaccggctggtgaacgagaagttccgggagatgatcccatttgctgtggtgggcagtgaccacgagtaccaggtcaacggcaagaggatccttgggaggaagaccaagtggggtaccatcgaagttgaaaacaccacacactgtgagtttgcctacctgcgggaccttctcatcaggacgcacatgcagaacatcaaggacatcaccagcagcatccacttcgaggcgtaccgtgtgaagcgcctcaacgagggcagcagcgccatggccaacggcatggaggagaaggagccagaagccccggagatgtagacgccaccctgcccacccccgggatcctgcccccaagtcatttccgtccccccccaggccctcccaccaccccattttattttatatgattttctccatttgtcatcgttccccaccccttcgacatgctgccaggaaacaagggaaggggcctccctccgagtgagtcagtgatgaggccgcggcctccccgaggttgtggggaggctgcactggagccacaggcaggggtgagagcacccactgaattgacatgaccctctgtccccaggcctggctccccgagggctcagaagagcagcttcggtgtgcagatcatccgtctgtgtggggttctcagtgccggaggccttggggtgggggccaggcctcgcacttgcagaggagcccagtgggctgcacgctcccctccatccccatcggccctgtcccctggagtgtgtcagagcccaggggagaatgcagcccaccaggagcacctggaccccctgcccgccacatggtgtggccatcactcagcccctacccctgccctgctcctaagggtagaaaactccagggtcccctgccaccgactgcccagccactccaagccccctggcagctgcccctcctggagcagaaagtgcctttatctcagccatccgcagactgcttggccagatgcggggacaggctggaatgagggaggcgtcttcatctccctgccatccccctctcacgccacccccgcccccaccgggctgcaggtgctgctgatgcgctgggatctgattgaggataaaaaggaaggagagatgacccctaccccctcatcccccagttttgaaaaggtctaagcaagtgagtctggtggaggagctgagggagggagccatggaaggtgccagaaggaaggttggcgggggcacgtgtgggccgtggcttgggctggtcagagtggcgtgagctgcccggcgcctgccctgcccaagtgaccagggaagtgtgtgtgtgtccatgtgtatgcgtgtccgtctgtctgtctagtgtctgggtttggcccaagactgggctgtagttacattaatgcccagccagccacccctgccactcacccttcctggcccaggccttgctgactctctgagctggggaggtgggaggccaggcgagcctgactctgttgatctacccgtgcctgggcccctcccctcagagcccatggtaacgaacccctagaaaggagagaacgggcgtcaggggtgcacagtccacagctgaagagcaaggtttcgtggcagcacggcccggcccctcaccctctgtccccacgaggggacccatgggggctgtctttgcagggcacagatgaccaaagtcccttcctgcttcctgttacctgtcttgctcctggggagaaagaggggcctgatgagactccactcaggtgcacacatcaccaggtgcatctgcaggcaccgggctggctgcttgcagccaggagaaggtcagcgagaaggagtgtatgagtgtgagtgtgtgtgcatggaagttggggcactgggcgtctgactccctccccacccaagagaggaaggacccctcaccacccccactggtgagacagtttactttgccaacttgccatgtttttgccaaaaccaagattttgaaggaaatgagtggccagcgccagggcccaggccatgtggcctgcccagcctcaatgtcacttggtggcggggtggggtgggggtgggcagcagcatcccagccttgagatgcttcactttccttctctgtaaccagactttgaaaaattgttcgtttcatcaggctctgttcctcaatggccttttgctacgtgcctcccgagaaatttgtctttttgtataaatgacaaagtgttgaaaatgtatttcctgaaataaatgtttcaaatgcagaaaccc

SEQ ID NO: 17 - DNA, 3971 bp, Homo Sapiens
ccccaggcctggccttgacaggcgggcggagcagccagtgcgagacagggaggccggtgcgggtgcgggaacctgatccgcccgggaggcgggggcggggcgggggcgcagcgcgcggggaggggccggcgcccgccttcctcccccattcattcagctgagccagggggcctaggggctcctccggcggctagctctgcactgcaggagcgcgggcgcggcgccccagccagcgcgcagggcccgggccccgccgggggcgcttcctcgccgctgccctccgcgcgacccgctgcccaccagccatcatgtcggaccccgcggtcaacgcgcagctggatgggatcatttcggacttcgaagccttgaaaagatcttttgaggtcgaggaggtcgagacacccaactccaccccaccccggagggtccagactcccctactccgagccactgtggccagctccacccagaaattccaggacctgggcgtgaagaactcagaaccctcggcccgccatgtggactccctaagccaacgctcccccaaggcgtccctgcggagggtggagctctcgggccccaaggcggccgagccggtgtcccggcgcactgagctgtccattgacatctcgtccaagcaggtggagaacgccggggccatcggcccgtcccggttcgggctcaagagggccgaggtgttgggccacaagacgccagaaccggcccctcggaggacggagatcaccatcgtcaaaccccaggagtcagcccaccggaggatggagccccctgcctccaaggtccccgaggtgcccactgcccctgccaccgacgcagcccccaagagggtggagatccagatgcccaagcctgctgaggcgcccaccgcccccagcccagcccagaccttggagaattcagagcctgcccctgtgtctcagctgcagagcaggctggagcccaagccccagccccctgtggctgaggctacaccccggagccaggaggccactgaggcggctcccagctgcgttggcgacatggccgacacccccagagatgccgggctcaagcaggcgcctgcatcacggaacgagaaggccccggtggacttcggctacgtggggattgactccatcctggagcagatgcgccggaaggccatgaagcagggcttcgagttcaacatcatggtggtcgggcagagcggcttgggtaaatccaccttaatcaacaccctcttcaaatccaaaatcagccggaagtcggtgcagcccacctcagaggagcgcatccccaagaccatcgagatcaagtccatcacgcacgatattgaggagaaaggcgtccggatgaagctgacagtgattgacacaccagggttcggggaccacatcaacaacgagaactgctggcagcccatcatgaagttcatcaatgaccagtacgagaaatacctgcaggaggaggtcaacatcaaccgcaagaagcgcatcccggacacccgcgtccactgctgcctctacttcatccccgccaccggccactccctcaggcccctggacatcgagtttatgaaacgcctgagcaaggtggtcaacatcgtccctgtcatcgccaaggcggacacactcaccctggaggagagggtccacttcaaacagcggatcaccgcagacctgctgtccaacggcatcgacgtgtacccccagaaggaatttgatgaggactcggaggaccggctggtgaacgagaagttccgggagatgatcccatttgctgtggtgggcagtgaccacgagtaccaggtcaacggcaagaggatccttgggaggaagaccaagtggggtaccatcgaagttgaaaacaccacacactgtgagtttgcctacctgcgggaccttctcatcaggacgcacatgcagaacatcaaggacatcaccagcagcatccacttcgaggcgtaccgtgtgaagcgcctcaacgagggcagcagcgccatggccaacggcatggaggagaaggagccagaagccccggagatgtagacgccaccctgcccacccccgggatcctgcccccaagtcatttccgtccccccccaggccctcccaccaccccattttattttatatgattttctccatttgtcatcgttccccaccccttcgacatgctgccaggaaacaagggaaggggcctccctccgagtgagtcagtgatgaggccgcggcctccccgaggttgtggggaggctgcactggagccacaggcaggggtgagagcacccactgaattgacatgaccctctgtccccaggcctggctccccgagggctcagaagagcagcttcggtgtgcagatcatccgtgtggggttctcagtgccggatggggtgggggccaggcctcgcacttgcagaggagcccagtgggctgcacgctcccctccatccccatcggccctgtcccctggagtgtgtcagagcccaggggagaatgcagcccaccaggagcacctggaccccctgcccgccacatggtgtggccatcactcagcccctacccctgccctgctcctaagggtagaaaactccagggtcccctgccaccgactgcccagccactccaagccccctggcagctgcccctcctggagcagaaagtgcctttatctcagccatccgcagactggccagatgcggggacaggctggaatgagggaggcgtcttcatctccctgccatccccctctcacgccacccccgcccccaccgggctgcaggtgctgctgatgcgctgggatctgattgaggataaaaaggaaggagagatgacccctaccccctcatcccccagttttgaaaaggtctaagcaagtgagtctggtggaggagctgagggagggagccatggaaggtgccagaaggaaggttggcgggggcacgtgtgggccgtggcttgggctggtcagagtggcgtgagctgcccggcgcctgccctgcccaagtgaccagggaagtgtgtgtgtgtccatgtgtatgcgtgtccgtctgtctgtctagtgtctgggtttggcccaagactgggctgtagttacattaatgcccagccagccacccctgccactcacccttcctggcccaggccttgctgactctctgagctggggaggtgggaggccaggcgagcctgactctgttgatctacccgtgcctgggcccctcccctcagagcccatggtaacgaacccctagaaaggagagaacgggcgtcaggggtgcacagtccacagctgaagagcaaggtttcgtggcagcacggcccggcccctcaccctctgtccccacgaggggacccatgggggctgtctttgcagggcacagatgaccaaagtcccttcctgcttcctgttacctgtcttgctcctggggagaaagaggggcctgatgagactccactcaggtgcacacatcaccaggtgcatctgcaggcaccgggctggctgcttgcagccaggagaaggtcagcgagaaggagtgtatgagtgtgagtgtgtgtgcatggaagttggggcactgggcgtctgactccctccccacccaagagaggaaggacccctcaccacccccactggtgagacagtttactttgccaacttgccatgtttttgccaaaaccaagattttgaaggaaatgagtggccagcgccagggcccaggccatgtggcctgcccagcctcaatgtcacttggtggcggggtggggtgggggtgggcagcagcatcccagccttgagatgcttcactttccttctctgtaaccagactttgaaaaattgttcgtttcatcaggctctgttcctcaatggccttttgctacgtgcctcccgagaaatttgtctttttgtataaatgacaaagtgttgaaaatgtatttcctgaaataaatgtttcaaatgcagaaacccag

SEQ ID NO: 18 - DNA, 3921 bp, Homo Sapiens
gttggcccggggccttcagtggcctttgtgtctgggtgagaggaaccctggatggccactctgccctgagtgtgtgggtccccagaagtgctgggttagggggcacggagggccagaaagtcccctttggagcgctggactctctcgctgactcctaccccaccccggcctggggtttcagagaaggggtccaggcaggagtgtcatcttttctcaatggggatgtggcttcagtctctgtccaggaggcacgcggacctccagtggccggctccggaggcttggtgactccagtggcccagccttgaaaagatcttttgaggtcgaggaggtcgagacacccaactccaccccaccccggagggtccagactcccctactccgagccactgtggccagctccacccagaaattccaggacctgggcgtgaagaactcagaaccctcggcccgccatgtggactccctaagccaacgctcccccaaggcgtccctgcggagggtggagctctcgggccccaaggcggccgagccggtgtcccggcgcactgagctgtccattgacatctcgtccaagcaggtggagaacgccggggccatcggcccgtcccggttcgggctcaagagggccgaggtgttgggccacaagacgccagaaccggcccctcggaggacggagatcaccatcgtcaaaccccaggagtcagcccaccggaggatggagccccctgcctccaaggtccccgaggtgcccactgcccctgccaccgacgcagcccccaagagggtggagatccagatgcccaagcctgctgaggcgcccaccgcccccagcccagcccagaccttggagaattcagagcctgcccctgtgtctcagctgcagagcaggctggagcccaagccccagccccctgtggctgaggctacaccccggagccaggaggccactgaggcggctcccagctgcgttggcgacatggccgacacccccagagatgccgggctcaagcaggcgcctgcatcacggaacgagaaggccccggtggacttcggctacgtggggattgactccatcctggagcagatgcgccggaaggccatgaagcagggcttcgagttcaacatcatggtggtcgggcagagcggcttgggtaaatccaccttaatcaacaccctcttcaaatccaaaatcagccggaagtcggtgcagcccacctcagaggagcgcatccccaagaccatcgagatcaagtccatcacgcacgatattgaggagaaaggcgtccggatgaagctgacagtgattgacacaccagggttcggggaccacatcaacaacgagaactgctggcagcccatcatgaagttcatcaatgaccagtacgagaaatacctgcaggaggaggtcaacatcaaccgcaagaagcgcatcccggacacccgcgtccactgctgcctctacttcatccccgccaccggccactccctcaggcccctggacatcgagtttatgaaacgcctgagcaaggtggtcaacatcgtccctgtcatcgccaaggcggacacactcaccctggaggagagggtccacttcaaacagcggatcaccgcagacctgctgtccaacggcatcgacgtgtacccccagaaggaatttgatgaggactcggaggaccggctggtgaacgagaagttccgggagatgatcccatttgctgtggtgggcagtgaccacgagtaccaggtcaacggcaagaggatccttgggaggaagaccaagtggggtaccatcgaagttgaaaacaccacacactgtgagtttgcctacctgcgggaccttctcatcaggacgcacatgcagaacatcaaggacatcaccagcagcatccacttcgaggcgtaccgtgtgaagcgcctcaacgagggcagcagcgccatggccaacggcatggaggagaaggagccagaagccccggagatgtagacgccaccctgcccacccccgggatcctgcccccaagtcatttccgtccccccccaggccctcccaccaccccattttattttatatgattttctccatttgtcatcgttccccaccccttcgacatgctgccaggaaacaagggaaggggcctccctccgagtgagtcagtgatgaggccgcggcctccccgaggttgtggggaggctgcactggagccacaggcaggggtgagagcacccactgaattgacatgaccctctgtccccaggcctggctccccgagggctcagaagagcagcttcggtgtgcagatcatccgtctgtgtggggttctcagtgccggaggccttggggtgggggccaggcctcgcacttgcagaggagcccagtgggctgcacgctcccctccatccccatcggccctgtcccctggagtgtgtcagagcccaggggagaatgcagcccaccaggagcacctggaccccctgcccgccacatggtgtggccatcactcagcccctacccctgccctgctcctaagggtagaaaactccagggtcccctgccaccgactgcccagccactccaagccccctggcagctgcccctcctggagcagaaagtgcctttatctcagccatccgcagactgcttggccagatgcggggacaggctggaatgagggaggcgtcttcatctccctgccatccccctctcacgccacccccgcccccaccgggctgcaggtgctgctgatgcgctgggatctgattgaggataaaaaggaaggagagatgacccctaccccctcatcccccagttttgaaaaggtctaagcaagtgagtctggtggaggagctgagggagggagccatggaaggtgccagaaggaaggttggcgggggcacgtgtgggccgtggcttgggctggtcagagtggcgtgagctgcccggcgcctgccctgcccaagtgaccagggaagtgtgtgtgtgtccatgtgtatgcgtgtccgtctgtctgtctagtgtctgggtttggcccaagactgggctgtagttacattaatgcccagccagccacccctgccactcacccttcctggcccaggccttgctgactctctgagctggggaggtgggaggccaggcgagcctgactctgttgatctacccgtgcctgggcccctcccctcagagcccatggtaacgaacccctagaaaggagagaacgggcgtcaggggtgcacagtccacagctgaagagcaaggtttcgtggcagcacggcccggcccctcaccctctgtccccacgaggggacccatgggggctgtctttgcagggcacagatgaccaaagtcccttcctgcttcctgttacctgtcttgctcctggggagaaagaggggcctgatgagactccactcaggtgcacacatcaccaggtgcatctgcaggcaccgggctggctgcttgcagccaggagaaggtcagcgagaaggagtgtatgagtgtgagtgtgtgtgcatggaagttggggcactgggcgtctgactccctccccacccaagagaggaaggacccctcaccacccccactggtgagacagtttactttgccaacttgccatgtttttgccaaaaccaagattttgaaggaaatgagtggccagcgccagggcccaggccatgtggcctgcccagcctcaatgtcacttggtggcggggtggggtgggggtgggcagcagcatcccagccttgagatgcttcactttccttctctgtaaccagactttgaaaaattgttcgtttcatcaggctctgttcctcaatggccttttgctacgtgcctcccgagaaatttgtctttttgtataaatgacaaagtgttgaaaatgtatttcctgaaataaatgtttcaaatgcagaaaccc

SEQ ID NO: 19 - DNA, 1328 bp, Homo Sapiens
cgggactcccgccgctgctaaatatatccgtaggaatggagagggaccggatctcagccttgaaaagatcttttgaggtcgaggaggtcgagacacccaactccaccccaccccggagggtccagactcccctactccgagccactgtggccagctccacccagaaattccaggacctgggcgtgaagaactcagaaccctcggcccgccatgtggactccctaagccaacgctcccccaaggcgtccctgcggagggtggagctctcgggccccaaggcggccgagccggtgtcccggcgcactgagctgtccattgacatctcgtccaagcaggtggagaacgccggggccatcggcccgtcccggttcgggctcaagagggccgaggtgttgggccacaagacgccagaaccggcccctcggaggacggagatcaccatcgtcaaaccccaggagtcagcccaccggaggatggagccccctgcctccaaggtccccgaggtgcccactgcccctgccaccgacgcagcccccaagagggtggagatccagatgcccaagcctgctgaggcgcccaccgcccccagcccagcccagaccttggagaattcagagcctgcccctgtgtctcagctgcagagcaggctggagcccaagccccagccccctgtggctgaggctacaccccggagccaggaggccactgaggcggctcccagctgcgttggcgacatggccgacacccccagagatgccgggctcaagcaggcgcctgcatcacggaacgagaaggccccggtggacttcggctacgtggggattgactccatcctggagcagatgcgccggaaggccatgaagcagggcttcgagttcaacatcatggtggtcgggcagagcggcttgggtaaatccaccttaatcaacaccctcttcaaatccaaaatcagccggaagtcggtgcagcccacctcagaggagcgcatccccaagaccatcgagatcaagtccatcacgcacgatattgaggagaaaggcgtccggatgaagctgacagtgattgacacaccagggttcggggaccacatcaacaacgagaactgctggcagcccatcatgaagttcatcaatgaccagtacgagaaatacctgcaggaggaggtcaacatcaaccgcaagaagcgcatcccggacacccgcgtccactgctgcctctacttcatccccgccaccggccactcgtacctgcccctcctggagcagaaagtgcctttatctcagccatccgcagactgcttggccagatgcggggacaggctggaatga

SEQ ID NO: 20 - protein, 586 aa, Homo sapiens
MKKSYSGGTRTSSGRLRRLGDSSGPALKRSFEVEEVETPNSTPPRRVQTPLLRATVASSTQKFQDLGVKNSEPSARHVDSLSQRSPKASLRRVELSGPKAAEPVSRRTELSIDISSKQVENAGAIGPSRFGLKRAEVLGHKTPEPAPRRTEITIVKPQESAHRRMEPPASKVPEVPTAPATDAAPKRVEIQMPKPAEAPTAPSPAQTLENSEPAPVSQLQSRLEPKPQPPVAEATPRSQEATEAAPSCVGDMADTPRDAGLKQAPASRNEKAPVDFGYVGIDSILEQMRRKAMKQGFEFNIMVVGQSGLGKSTLINTLFKSKISRKSVQPTSEERIPKTIEIKSITHDIEEKGVRMKLTVIDTPGFGDHINNENCWQPIMKFINDQYEKYLQEEVNINRKKRIPDTRVHCCLYFIPATGHSLRPLDIEFMKRLSKVVNIVPVIAKADTLTLEERVHFKQRITADLLSNGIDVYPQKEFDEDSEDRLVNEKFREMIPFAVVGSDHEYQVNGKRILGRKTKWGTIEVENTTHCEFAYLRDLLIRTHMQNIKDITSSIHFEAYRVKRLNEGSSAMANGMEEKEPEAPEM

SEQ ID NO: 21 - protein, 190 aa, Homo sapiens
MTLCPQAWLPEGSEEQLRCADHPCGVLSAGWGGGQASHLQRSPVGCTLPSIPIGPVPWSVSEPRGECSPPGAPGPPARHMVWPSLSPYPCPAPKGRKLQGPLPPTAQPLQAPWQLPLLEQKVPLSQPSADWPDAGTGWNEGGVFISLPSPSHATPAPTGLQVLLMRWDLIEDKKEGEMTPTPSSPSFEKV

SEQ ID NO: 22 - protein, 422 aa, Homo sapiens
MEPPASKVPEVPTAPATDAAPKRVEIQMPKPAEAPTAPSPAQTLENSEPAPVSQLQSRLEPKPQPPVAEATPRSQEATEAAPSCVGDMADTPRDAGLKQAPASRNEKAPVDFGYVGIDSILEQMRRKAMKQGFEFNIMVVGQSGLGKSTLINTLFKSKISRKSVQPTSEERIPKTIEIKSITHDIEEKGVRMKLTVIDTPGFGDHINNENCWQPIMKFINDQYEKYLQEEVNINRKKRIPDTRVHCCLYFIPATGHSLRPLDIEFMKRLSKVVNIVPVIAKADTLTLEERVHFKQRITADLLSNGIDVYPQKEFDEDSEDRLVNEKFREMIPFAVVGSDHEYQVNGKRILGRKTKWGTIEVENTTHCEFAYLRDLLIRTHMQNIKDITSSIHFEAYRVKRLNEGSSAMANGMEEKEPEAPEM

SEQ ID NO: 23 - protein, 197 aa, Homo sapiens [sequence omitted]

SEQ ID NO: 24 - DNA, 2804 bp, Homo Sapiens
ccaaggcccgccggacctgaggtcgcctggggcgctaaacagacccatctatgagcacattcggccaacacacccaagttcaacagtgggcgggatctttggctggcctcgatctctctcacagtgtgtgcaaacgggtacccattagattctttttgcttgtttcctcatctgtaaactttgaaaggagagtatttcccggggtgattctgaaaatcatgccagaactgaaaaggcctgtgtaaatgcgaggtgtaatgatgacttattagaagcagccagccctgtacgtgcctgtaggatagatgctagaacgttctacaaatgtgtgcacatacacatcacgtatgtgtgaaggtgcacacctgtccctagacacttgacaaatgcacacacgtatgcgtgtacctctggctgagagcaaaggggctaatacagggctcatacaggacatcatcctgcagtcttgtgcgtgcacagtacacacgcgagcacgactgtctgtgcctggagacaccgtatggcaccggaggagctgctcagccgtcggtgccacctgggaagtagggtttcgggtgctgctctggagcgcgggaaagtccggatccgggtctgctggtcagcgcttcggcgccgccgggctcctttatctctcatccgccggccggtgagcggctccagtttcaagacccccgatcctgccggtgaggggagggagcgagaaggagtgcgctccgggcccaagaggctgcagggccccactccccaggtctgtcgtccttcctttatctcctcaggtcacacccccacttaaaataaagaagggtgcctgactcattcaggtcagggaagtcggcccccgggagcctcctgccctcacaagccatggtgaagggaggcgaagccagggtttgccacggcctgggagaaaatgcggctgcagggtctctttgggctgcagcgctggcccggggccccaagactgttaaggtgtgtgtgggaggcgcgcagtgtggctaccgaagagccctccatcaccgcaccggcaggccgccgggctcgtcctcctctcatgcttccaagggttctgagctgcgcagcactcgcatcacccagaagtgtctgtggagaaaacgacctcaggtgtaagcccaaggctgctgcctgcaaaggcaatgccgtggagactgggttccacagcgacctgggtttttaagtcaccgaaagctacagggcagggtcacaaacactctcccgccttctctgcagaaccgtgcggctgacaggagagcgttgcgcagaaaattcgaggccgggcgctggaggagtctccgcggcccggagaaggcacagaggcgcccctgagaggcgcagctggaacaggcgatgcacgggttcggatctggccggccaaccgagcccagcggtcgcgaaaaccagagtcgccacagaggttgagcacgattccatttctggggatcgggtccggtggggagccactgtccctaacgcctccagagactttaagtaggacaatataatgctggtaggagcaaggtgcaaggaatttagcggcagaagcctttcgggggggtggggaaaggcagatccgtgcctcgtctgagcctgggggtggggacagcccctggccttgtagcccctgttccggggatcagctgggcccacctaacccccctacatggggttgaaaggggccaatgggacggccccgccgcccctccctcgggattccacagggccctgacccggcctttatctctgcacggtcagcagtcgcgggggcttcaggaaggaggacaaaggcccggtgtcaccgcgggcgggggctcggtttcctggctctctgctcacactcacagcctttagcggttgttgggggaagatttttaaaaatatgtgtcgaatttcctttttttctcttctagaaacaaacaaacaaaaaaggcaaaaggcgaattccccttcactcctcgtccatagagattaaagtttcctgggatcctgccctttttttttctttgactgcctagaaatacttgttctcccttgtacatagaggaaaatgcggggaaaggttttttaaaactcggtttcatactattattattactaaggacaaccgggcaggctgaggtcccaacgtggatgatccgagttggcctcgcgccggggctctgcagccactgccctgtgcgctcagcacctctgggggcgatcagggcccctgcgcttccgcccgccgcccggcagtcgagagcaccctgtgcccagactggccgactcattctcccccgaattttgtttagagctggcaagggggacttagctcgcgccccaagacctgggcttgcagcgccgccaacaggcccggggacacgaggcgctccaggccggggtcttcccggctgctggcccctctcgctccccacccgctggcggcgcctcggtcgcccgcaattgacccaacccgcttcctgcgtttgcccctcaggtttcccgtttctccacaaaggcctaggggagcctcgcccacaggctgaccctgcaacctctggcccggtggctaccttctgcttttctgaaaaagaaaaggaaaaaaaaaaaaaaaaagaaaaaatcaaccagtcgagggaggcgcgtgaggactggaggcgccagccggacagcctatgagtaggtccctgggtcggtgccgcttcgcgggtcagcacggcctttctcagagaaaacctcctaaacgtgtgaagaccgctttgggggaagcgagagggaggttggaggag

SEQ ID NO: 25 - DNA, 3952 bp, Homo Sapiens
ggccgcagccggagaggaacaggaaccgcagtggggacgccctggtccccgggcccacagcatccgggacggacgcgcagtagcgcgggccgggaactgggtaccagggcgggatgggtgagaggctctaagggacaaggcagggagaagcgcagcggggtgcggggaaccgcacgccctccctttgcctctgcttcccaccccgaggcggcagggcgggcgggcgcggttccgggggtgggcgggctgggcggggcggaggcggggccgcagcactggcttcacccagcctctcccgcccgcagccagagcgagccgagccgcggccagctccggcgggcagggggggcgctggagcgcagcgcagcgcagccccatcagtccgcaaagcggaccgagctggaagtcgagcgctgccgcgggaggcgggcgatgggggcaggtgccaccggccgcgccatggacgggccgcgcctgctgctgttgctgcttctgggggtgagtgttagccggagggggcccgctccctttcccgggatcagaactccgagaagagccgggcgccgccaccaaggaaacagaacagagcattggggtcccagatactgagggtgggtggtgggaaaggacctctgatgccgggaccacgaaggagggtctagggttcccggagcgcagaggcgactctccagggtggagatgagggcaagaccggagcacggatgccggtcctcaggtaccgcagggggcggtgggggagctgggaggggtctttcaagagggggcatggggctctccgatgcccaggttcttcggaagaggacactcgaatgccgggatcccgaagggactttcccctcagcatctcggtctctggagagtcgtgggacagaaccaaggcgagagaaggagggggaactggacggggactagagatgagaggggcgagctgggctggggcggggagcccgggacgacgggatggaacaatggaggaggtcggagggactggaggcagaggggacccggcaaggacaatggggaccggccagacaatgggggggaggggcgtcggagggagaggttggggagcgggagagaggttgagaagtgggttagggagggcagaagaggggcgacggcgagggcggcagagagatggaagcagaaggaaaggagacagagcggggcgcggaccctgaagtggtcggggtcccgcctgcccgctgagggacagtgagacgagaagagagagcagaggcttggacatttccagcgcctgtccccgcgctcctgctcgcggcctctcccagtcccggaattggggctgcggatctaaggctgggaggggagtgcccacttcgccggggcgaacccgctcccggggttcccccacggccggcgggctcctccgacgcgcgtgttctcacggcttgaagcagcgcagcggatcgcgagggacggagcgggtgtgcccctacccgggctggcggtggctacgtctcggggtgcagagcgccggggcgcactaggcggggacccttcctggccgcgcgcagctctggctacgcaggcgggaggcggcaggcagggggcgctgcggggcgaggcaagtgcagtccgccgctgcctgcctgcgagtctggggctgcgcgccgctccccacctagctgcgcgacccgagcgccgcgcccaccgcgctccgtgggctcccgcgcctcgaagggtcgggatccggtctgagcctctcctggctctcggtgcaagccgctgggcacctaacgagacgggggcgcccggacgcctcggattctgtagcgcggtatcccgggccaccgactcggcaaaggtcggcgggtcctccgggtggtccgacgagattgtcagatgtggcctgctttatggccatgaaccgaatgccctggaaggtctggcaacggaggaggcgtcttcactctccccgccagcatctttcatcagagcactgcgccccaaattccggctttacagatacggagactgaggctctgagagtttaaacgacttggccaagatctcacagcaagttgggccagagtcgtggctagactccccgacctgattcccagctcggtactcccccaccttttcagggggcagccgctgtcccagctcggggtcacggctgcgtttcccagcagggcggggggggttgacactgtccccagagtccgtcggcggtagagcctgcgggtgaggtgggcagagattctgtccgggtgcgggccccagcccgaaagctcagccccagttccctggagctgtcaggacctgtggctgcgtccggggatttgggagcgaccgcgggcacgtctgctgactaacgccgctggttagagacgctgctcagacgcgggtgggcgagcgtagaccaggagagcggggaggagggaccggatcccagaggggcaacgacttgggctccgggtctgggcaagagcgagggtccccgcgcgaagacccaaggaaggaggggagctgggcgtggaggacctgggcgcttgggaaggtgtaccccgacaggaacctgccgtctgcagcccctgcggctcccgcctccgcctcggcgcgcggctgctcggtctgggatggctgtgcgcggtccgagtttcttcctgggccgcggtgagagagagagggctgaaaccagagcgcgtcccggcgggtcggctggcgggccgcgccggtaatggaggcactttgtcattcagacgtctgtaaccagagccgccgggctggctaatgcgcctaatagggatggaacgagggcagcaaatgggcgtgcgtgagcggccgggctgagctgggtggatggtggatggggaggcagctccgcgggggacgggcccctaccgcactgttccagcccagtctggctcaagcgcctcgcttcttccctgggggaccgcgtggggaggcgggaataatcgatgtgctgagttcctactaagtgccttgcacttccctggtagtttctcttgaattatttaatccttataaggtcctagcaaggtgaatttagttattcccacttcgcagttgaggaaacagaaccttctagactttcaggcccgagaccaggctcccccagtgagtcagtggtggcgtctttgttggaacccaggatgcttggcctgggatgttctctttcctacatatgccaggctccctcccgccccctaccttctagatcatggaaggagtcgtggctctgagagattaaatcgtgccctatgcctttggccccacacatttagatctgagccccttctccacacgcagaggccctgccccctctcaagtctctatgctacattatcttgggtaattagctcctttcctcccaactcctcccctatccaaagggagtgaggggtatgtgccagtgcctcccctgggtttgcatcgacctcaaaaggccctccaggtgtttgaaaatctctcccatcccatggcggtgaccacggccccattcacttaagagctctttgctgaagctgttggaatggccagggctgattatactgaaacattcgtatggtttcaaatactttcaactgtttcgctgtttctctcttttctctaattaaaaaaaatgaaaattcttaaaagtcaattcatctaaggatccttccaccttagttccttgtaagccttgaaatggccaaaacaaaaagattacaagcgttcttaaaaatgagatgaaatcattctgtcaaatgtgaaatgactaagtgtaacacatacaaatttcagggaaatttatctgtcatccctataaattaatccttttggatctgattttggagcaattagcctgaatgttagtcacccctccctacttggctaaactctcccctcctgcctggggtctccttaagatgagatgcttctttgataactaacatttatt

SEQ ID NO: 26 - DNA, 2820 bp, Homo Sapiens
cctaggggacaatacccaggcatgttaacggagtttaaaatgccaaggaaattacaccacaattctgcccagtatactacaggctgtcaaaccgaaatgctatgccagctaggagtgcagcaactcccatcctctggccctatttaattaggaagcttcagcagagcgaagcctgccaagcgttcgccgtcagaatctgaaggaacccgagcgagcaagaagagtgcctgacccactccacagaagcctgtccagaaatggaggagtcagcgcccactgaagtcggttccgccctcggctcgcctacatggagcctgaccagcctcagtcatgcccactccggcctgggagacccgcaaagtgttctttttctcaactcccctgtactaccttgaagcttagggaagcaaagagaggggcatatctggactgcaaaaccaatgtcttttgccgcctaggagagaagggaatgagagagagagagagatagatagatagagagagagagagagagagagagagagagagagagagagagagagaaattctattgaaacccagctcctctagaatctgtgtgacctggtcttcaacgggagaccagtgcgacctcatggcacctttgccaggaatcagcgattcccctgcagtcaccatttgatttattgctttctcgctcattctttctcataaagttatttcttcctcatcctagtaagacttttttctttaatgatgacaaagcttctgtttcagtgtttcccctaggattggtgctctttcaaaacagtgaacccagaaaaccatcccgtttaatatttctcaaaatcctcgcagctccaatgtaagcgcaagcatgcaaaggtttcctgctacacctgcactttctgcccatcccagaaccacccctcacccccgggcctgcaacagttccccttgtttctctggatagaggtgggtggtattaggggtctagggcagtaggaggtgaggggctgaggaggccgctagggtaggctggtctgtgctggatacgcgtgttcttctgcggagttaaagggtcggggacgggggttctggacttaccagagcaattccagccggtgggcgtttggcagtcacttaaggaggtagggaaagcagcgagcttcaccgggcgggctacgatgagtagcatgacgggcagcagcagcagccagcaaaagccctcgcaaagtgtccagctgctgcactgccgcggggactcccacagcaccatgactagttcgtgcaactctgcagcagcaaacggcttccgaggaacacaggatcgcgggggccgggcagcgggctactgagcatcccgcggacggcggcagcagaggcggcggcggtggcagtggcacccggcggggaagcagcagccaaacccgcgcatgatctcgagagtttcagcaacatccagggactgggctcagccccggagcgagagggtcgtccgctgagaagctgcgccggagacgcgggaagctgctgccataaggagggagctctgggaagccggaggacaggaggagacgggagtccaggggcagacgagtggagcccgaggaggcagggtggagggagagtcaaggcgccccgcagcccggcagccgcctctcgagctctgccgcccgcatccctctggcgtttgggaagcagcaggtcctcagcccgcccggggtcacgtgggaagaggcagtcgggctctgattggtggagcaggatgcaggtcccgggagggaggggtcgacgaggaggtgcaaggatgcaaggaggaggcggccgcggaagccacagatgggctcgctcgccaggcgctggcccgagtggggctaggcggggatggctcaaatgagaagctcgggcttcagggtgggctacccgcacactcatataccattcgcctcactctccgctccaggacgccccctaccgaaggcggggtccggactagcgcccctcttccgcgcgtgaccccgggccgcgagtgcgggccgcggctgggtggcgtctctccgagctggagatggtgggggcggaggtgtcagaggagcagcagcagcagggcagagaggggcgagtcggcgcgggagagggcgtcctgctggcgaccggcgctccagcgtgcgggagcgcgccgcctaggctgtagggggatgcaggctgggaatgtcgcggcggagaggccagggacgtttctctagggatttacaggaaagagggtgagaggcgatggtgttagaaccgctcttgccgacctggaagcaacagcagcatctcccacaagagcgtgcaaccccaaggctgctcgccgaggcagctcagccatcccggcaggcgctctccttccttctctcttctcccctctctcctcccaggccccccgcagctccgacccagcccaagcgttcgcaggtttgaatccctctcctcatcacccgctcctctccagcccgtagcctattagtgtgtccacctgggaggtgcggtcagatgtgtttggaaggtcagattggtcgggacaagtggtctgagagaaagagaaaggctcctctgcatacgccgcgggtgggttgccgggagcatcggccgggcagcggcgtccgggaaggggagagcgggctccatttgttggcccaggcagtgaccctgcgttccttactcgggtctttgccggatggccggtgacctggggcgacgagagaaggtctaactcggcaggagtctctggctctgcgcgtttctttcattctctccagcgggaagggcaaacggcatagcgggacccgccttccg

SEQ ID NO: 27 - DNA, 3104 bp, Homo Sapiens
gcgggcgctgtcgagcacggggaggtgctgaaatagtcctggcgtgctgattcaagctttgattggcagagccacccggtgactgacagggggtctccatggcgcccgcgccgccaatccgcccaccccaatagcggagccagctcgcctgccggcgtgcctgagccgagccgagcccgaaccccaagccgcggagccagcacctcctccagtcggggtcgtccgctcccggccgttgagccaccgccgccacccggtagtgtgtcccgctgccccaatccgcctcatcaacaagcgcctggcacactcagccaggcccgcgggcatctgctgcgtgtcccgctccgggctcagtgccctcgccgccgccggcactgcctcgatgttccagctgcccatcttgaatttcagcccccagcaagtggccggggtatgtgagaccctggaagagagcggcgatgtggagcgcctgggtcgcttcctctggtcgctgcccgtggcccctgcggcctgcgaggccctcaacaagaatgagtcggtgctacgcgcacgagccatcgtggcctttcacggtggcaactaccgcgagctctatcatatcctggaaaaccacaagttcaccaaggagtcgcacgccaagctgcaggcgctgtggcttgaagcacactaccaggaggctgagaagctgcgtggaagacccctgggacctgtggacaagtaccgagtaaggaagaagttcccgctgccgcgcaccatttgggacggcgaacagaagacacactgcttcaaggagcgcacgcggcacctgctacgcgagtggtacctgcaggatccataccctaaccccagcaaaaaacgtgagctcgcccaggcaaccggactgacccctacgcaggtgggcaactggttcaaaaaccgccgacaaagggaccgagcggctgcagccaagaacaggtcggtacctagaggcctccgcgctttgagcgcaccggggaggaggcgggtggaggcacctctggcgcccttacccagtccctggcgactccaattcagcaggagttgggagcgcggtctgtcttgggttaagagccctgcgttctgggctcctggccgggagttcccttgccggctctgcttccccacccgctggctccccacgcctgcgggcagctgcagcagctggtcccggtcaccaaaccaaggcttcactgggacggagaggggaagagaaataaaaaattaaaatcctacaaacagttagggaccccaagacccaaagctaattcttgtcagcctgggcacaggctcctactattaatcgaagcctggcttattagcaatgtgtcggtttcatgttaattatcattttcaaagcccaggtatatccctccctaatgctttgaaaacagttttcaatggacttttgagaaatgggaagtcgagttttcctcttcccatgcgctgcctgccactcttgtctcaaaacagcaaactagtccgtgggccgaggcttttcgtttcccggagtgtggatctcgattagccaaacattttgcggaagagcccggcctcatcccccaggcccaaatgctccttacaatcctttttgcctttaggtcgggccgacccgatccaacgcgatcgcgggagcacttgctcaggcgtaagccccaggcagacgcaccgttagaaatggtatcccatgtccctgggaccgatctgtccttgtcacccacacttcgtttatttcctgacagtcctgtaaatctcccaaaagtgcacaacaaacagggaggacactgcaagcccagtatataaaagacctgggagctgcggcgctgagaaagggcgcgaatcatggtggggcacaacagtagggacccgcggaggggcggccgcggactcctgcccgacctctgtcgccttgccgagtaatcctcgccttaactgctggggtcttcggaagaacctctagccgccgggctggagggacgcaggaggtggtgggggcgggcgacgggcggctgtgttacgagctgtgacccgtgttccctttcttccccgtagactccagcagcaggtcctgtcacagggttccgggcgggcactacgggcggagggcgacggcacgccagaggtgctgggcgtcgccaccagcccggccgccagtctatccagcaaggcggccacttcagccatctccatcacgtccagcgacagcgagtgcgacatctgagttgcccatccaggatgctcagaagcagattccagtgtaaaaacgagaaaaacaaaatgaaagaggggaagaagatgagagacctgcaaatccagcgccacagaagccaggtgaccagggacccgcgggctcgggttgccgtttcccgccccaccccgcggccggcctggcttcactggcgccctttggccgcgaccacgggaaccagcgtgaggcctgacccagcaccacgttcttcttgctttgctttttcctaaggattttgctgcaaagtctcttcggaacccgaactgcaagctgagcgcctgcccagattctcccatgggtatttcacgtcgaaaggacgctgttacatatgtataactttcgctttaaagtttttttttaacaaaacatatatatgctgtttatttacttatttaagagaccgccatggtaggtttctctgtagcttggggaacttgctgtttctaaacatgcaggctggtggtgatgggttctgtgtggagaagccaaacaataaaacaacctagtgggcaaccttcttaattaagggagctgctctcagattccttttcttcttattattattaatatcattcccttcaccaggcatgcagggacccttgagcaaatggtctccggaaggtcttacctatatatcttttgccttctttggtgcttcctggtatatgttttaaacaacctatggtaggtctataaccacctcccacgtcaaattacacgtatgtgcatatatgtatgtacctatacaaacatatgtatgtacctatacaaacatatgtatgtatgcatacacgtgatatatttaaggctagaaattggcaacatgtgagcgtcctctcta

SEQ ID NO: 28 - DNA, 2378 bp, Homo Sapiens
atcctgagattttagctgactttttctgttctgtaatcagaggggactgtgatttgggccaatttcttcctcatgggcttcagtggagtcagctgtggaatggaacatcaattcccaccccataggcatgttgtgaggtttcgctaagaaacagccataaaagggccttaagagttatgatgattgttttaaccatttagtagggagggggcatccagcggtgttgctcccacgtaccgatgtcacgtggggcggggaggcggggcggagaacggagagcgtcctctcattctccacccccttcctccaagtccagcgcagggggaggtggctgcgactgactgaggggctagggaaggctggccaggggcgtgggcgtggctggggacggcttgggggtggggctgcgcaggaggctggaggagccccgcgggacccagaggcggggcgtcggcccggggaccactgctcctccggggcgtggctgcaggaggctggaggagccccgcgggacccagaggcggggcgtcggccggggaccgctgctcctccggggcgtggctgctgccgagcatctcccagctcagccgagcccgtgcccaggccacgctttgttccagccgccgcctcctctaccctacggcgtccggagccatccctcgcctgctcgctctctcctttcgcccactccctgcatctgggcctgcatcacctttgccaaccgctcccccgatcctgccgacactcctcccccaaacttctgaccggcacccttgcctggtacccttctctccattcctccccctccatcttctttccccgacccctctcgggtccctcttttcccaaaacccgggtctctccgcgtggccccgcctccaggccggggatgtcccccgcggccccgcgcccatggtcctgacgctgcttctctccgcctacaagctgtgtcgcttcttcgccatgtcgggcccacggcggggcgccgagcggctggcggtgcctgggccagatgggggcggtggcacgggcccatggtgggctgcgggtggcccgggcccgcgaaagtgtcgccgggggcaggcaccgaggtgcaggacgccctggagcgcgcgctgccggagctgcagcaggccttgtccgcgctgaagcaggcgggcggcgcgcgggccgtgggcgccggcctggccgaggtcttccaactggtggaggaggcctggctgctgcggccgtgggccgcgaggtagcccagggtctgtgcgacgccatccgcctcgatggcggcctcgacctgctgttgcggctgctgcaggcgccggagttggagacgcgtgtgcaggccgcgcgcctgctggagcagatcctggtggctgagaaccggtgagcgcgccaggccggggttgggagagcgccgcgtggtgtggacagttaagcgcctgcgttcccgtgtgccttgcgccgtgcctttgcctccctcacctctctgactgcctgcactacatctctgttaggggtcagcctgtctgtttcacagataaggaaactgagccttgggaaagtttagtgacttgctcagtggatcacagtgaactaagatttgctcccagggctagtggggtgaggaatggagttacaggacaggagtccgtccctggctctatggatggagatggcatcctattgccaattctccctctcccccgccccccaagcccacagctctccttcccaccggcttgggttcccgtctatgacaccttctctcgccatcatcccatccctctcccaatgagagaagaagggaaacacaacgctcagaaaagagggagggagacctctcctttccctcctccccaggctgtaaggcgtgctggcctgaggctgcttactcccttcttgccgccccaatccaacttctgctccatccttcattctggttcttgcaacaggccagacatgatctcattctgcagctgctgatgggaaacagttttctgctgggaggcatgggtgggggaagaggacaccggggtgcagagcccggcggggaccaggcagagtgtgtgttctctcccttcaccccacttagcaccaagatgccgcaagagggtcaaacagaggcctggttgccactcttgcatgtctcttgggatctctcctggagtatgaagacctccaaggactcactttccctcccttctgatgccagagcagaccaagctgtcacactccagtctcatgctgaagtctccagcttctcaagcttagaagagtttttggaagagtcactttcagctcatgcagctctcacaagtgtgaagggagtgggttgggggtgttttccttgccattttcgaaaagaaaaaaattacctggtg

SEQ ID NO: 29 - DNA, 2436 bp, Homo Sapiens
agttctggatgacaaggactaattgcccagggcgttggccgagaggaataggaagagcgccccgtggagcagggcgggcgagaagagccgggcggccgcggggtcctcgcgcatgctgggcaggaagaggaagagctgcagcacgaaggtcaccagggagatgcacaagaagtaggcgggggccaccacgttgagcagccgcagggccagcatcctcgattacattcctgcggggcccggggtgagaagaggactgactgactacggcgtccagggggcgccctcgcccgctcctccgtgccgcgcgtctggggcactgcacgcgactccacgcccccaaccccctgtcccgcggatttcccctccccagttccctaaccccggatcaggcaggccagagacccgagcccgcagcggcctcgggtctaggccccacctgggggtgagtgttgcctggggttttgagcgagctcggcgccttggcgcggcagagtctggcacaggagggagggactcgtttgcagtctttaggagttgtgagggtggggggcaccgggggataggactcctcccctctgtggatgtggaaacaagcccaggtttgggatttctggttcagacctccctaggaggagaaagggaaggatttggggtcgggggcaggagaatcagcggcacttgacctgctggaaatcctgcttcacactcccctttctccgtccctgcgtccccacccacacacacatcttgggcagcactcagggacctcaccaggttacccaaggctctttggaggtatgtgtgcgtgagggaccacgatgtgtgtgtgtgtgtccttgtctgtgactctgtacgtgtaatctgtgtgcgcttgagtatctgtatttgtgtatgtatatatctgcgtgtacagacacgcagcctctgctatctagctttaaaaaaatcaattgaaacaatcgatacactcacactcgctctcgggcaccgggtgaggtgggggcgcaaccagaatacctgtgtcagcgggtcctggccagcacatctctccaacgctggctgcccgggctatttctttgcgaagagcgttttcatttgaggcgaaattaaaatccccccttcgcgcccgcctcccgccctcctgctgagagaaacccaaacaaccctcatggcgccgaaatcctttccatgccgacaagcccgccctgggcgcacgagtggatgcttggccagcctttcctgggatcgaccccgccgccgtgctcagccctcaccacgtccccatcccaccccacgcctcacagccggggttcctggccagcttcggaagccaccgagaaataggattccgtgcgcccgagagaacttttccaggggctaaggaatcggccagccggaggcgcgagaaaagttctgggaaggcggttgcacctaggatgggtggatgccacggggcctccgtccaggctgtcccgtccgcacgggtcgactggtcaccttggaatcccctttgcaggtcccagcgccccccgggaacccgcagcctccgcggagagcgtgggcctctccctaccgctggggcgcagcgcagtgcacgcctgagggtggtcgccgggggctgggcacgcccccagtcctgcgccgccgggggctgcggcggtgctgcccaccccagagagccctcggcctggggctccggcgaagcaagtgccttcccggcgccggtcgccaggggggcgcgggagcagccagatgcgccgcagcgctgggaaggcggcgaaggacaggggctaggggagtgaggggcgctcggcaggcagcctcagccctggccctgcgcgggagaagggacagcagagaccgcccgtggggccccggggtgtagggagctgtccgttcagccctggcgcccgcctcgcccgcggcagagggcggcacagccggagccttggaaagaccggcagcgccggcagccgcgggcttctcggccactgcctcccggacgcacgggaagccgccccccgcgccgccgccgccgcactgccgccgtcgcagaggggtgaggaaatcaactcaccgagctctggtcgccgacaagaggagccccggacgccggctctcgccctgcccgaggctgcaaagttgtggactcggcccggctggctcgcagcctgcgcttcgcttcgggaactgggcaagtagcggggatgtggggaggagggagcgggcagctgctggcttcccacttgggcgccagcgagtaagggccaggaagcggcggggatggcagctgggcaccccccagccccgccacccctccctccgctcctgggggcggtgctctggccgccagtctcagcatcgtggacttgccccctcctcccctctcgattccccttgagcgggctggggcgccctgcctggtttcagcgcccg

SEQ ID NO: 30 - DNA, 2804 bp, Artificial Sequence
  chemically treated genomic DNA (Homo sapiens)
ttaaggttcgtcggatttgaggtcgtttggggcgttaaatagatttatttatgagtatattcggttaatatatttaagtttaatagtgggcgggatttttggttggtttcgattttttttatagtgtgtgtaaacgggtatttattagattttttttgtttgtttttttatttgtaaattttgaaaggagagtatttttcggggtgattttgaaaattatgttagaattgaaaaggtttgtgtaaatgcgaggtgtaatgatgatttattagaagtagttagttttgtacgtgtttgtaggatagatgttagaacgttttataaatgtgtgtatatatatattacgtatgtgtgaaggtgtatatttgtttttagatatttgataaatgtatatacgtatgcgtgtatttttggttgagagtaaaggggttaatatagggtttatataggatattattttgtagttttgtgcgtgtatagtatatacgcgagtacgattgtttgtgtttggagatatcgtatggtatcggaggagttgtttagtcgtcggtgttatttgggaagtagggtttcgggtgttgttttggagcgcgggaaagttcggattcgggtttgttggttagcgtttcggcgtcgtcgggtttttttattttttattcgtcggtcggtgagcggttttagttttaagattttcgattttgtcggtgaggggagggagcgagaaggagtgcgtttcgggtttaagaggttgtagggttttattttttaggtttgtcgttttttttttatttttttaggttatatttttatttaaaataaagaagggtgtttgatttatttaggttagggaagtcggttttcgggagttttttgtttttataagttatggtgaagggaggcgaagttagggtttgttacggtttgggagaaaatgcggttgtagggtttttttgggttgtagcgttggttcggggttttaagattgttaaggtgtgtgtgggaggcgcgtagtgtggttatcgaagagttttttattatcgtatcggtaggtcgtcgggttcgttttttttttatgtttttaagggttttgagttgcgtagtattcgtattatttagaagtgtttgtggagaaaacgattttaggtgtaagtttaaggttgttgtttgtaaaggtaatgtcgtggagattgggttttatagcgatttgggtttttaagttatcgaaagttatagggtagggttataaatattttttcgttttttttgtagaatcgtgcggttgataggagagcgttgcgtagaaaattcgaggtcgggcgttggaggagttttcgcggttcggagaaggtatagaggcgtttttgagaggcgtagttggaataggcgatgtacgggttcggatttggtcggttaatcgagtttagcggtcgcgaaaattagagtcgttatagaggttgagtacgattttatttttggggatcgggttcggtggggagttattgtttttaacgtttttagagattttaagtaggataatataatgttggtaggagtaaggtgtaaggaatttagcggtagaagtttttcgggggggtggggaaaggtagattcgtgtttcgtttgagtttgggggtggggatagtttttggttttgtagtttttgtttcggggattagttgggtttatttaatttttttatatggggttgaaaggggttaatgggacggtttcgtcgtttttttttcgggattttatagggttttgattcggtttttatttttgtacggttagtagtcgcgggggttttaggaaggaggataaaggttcggtgttatcgcgggcgggggttcggttttttggttttttgtttatatttatagtttttagcggttgttgggggaagatttttaaaaatatgtgtcgaatttttttttttttttttttagaaataaataaataaaaaaggtaaaaggcgaatttttttttatttttcgtttatagagattaaagttttttgggattttgttttttttttttttttgattgtttagaaatatttgtttttttttgtatatagaggaaaatgcggggaaaggttttttaaaattcggttttatattattattattattaaggataatcgggtaggttgaggttttaacgtggatgattcgagttggtttcgcgtcggggttttgtagttattgttttgtgcgtttagtatttttgggggcgattagggtttttgcgttttcgttcgtcgttcggtagtcgagagtattttgtgtttagattggtcgatttattttttttcgaattttgtttagagttggtaagggggatttagttcgcgttttaagatttgggtttgtagcgtcgttaataggttcggggatacgaggcgttttaggtcggggttttttcggttgttggtttttttcgttttttattcgttggcggcgtttcggtcgttcgtaattgatttaattcgttttttgcgtttgttttttaggtttttcgtttttttataaaggtttaggggagtttcgtttataggttgattttgtaatttttggttcggtggttattttttgtttttttgaaaaagaaaaggaaaaaaaaaaaaaaaaagaaaaaattaattagtcgagggaggcgcgtgaggattggaggcgttagtcggatagtttatgagtaggtttttgggtcggtgtcgtttcgcgggttagtacggttttttttagagaaaattttttaaacgtgtgaagatcgttttgggggaagcgagagggaggttggaggag

SEQ ID NO: 31 - DNA, 2804 bp, Artificial Sequence
  chemically treated genomic DNA (Homo sapiens)
tttttttaatttttttttcgttttttttaaagcggtttttatacgtttaggaggttttttttgagaaaggtcgtgttgattcgcgaagcggtatcgatttagggatttatttataggttgttcggttggcgtttttagtttttacgcgtttttttcgattggttgatttttttttttttttttttttttttttttttttttttagaaaagtagaaggtagttatcgggttagaggttgtagggttagtttgtgggcgaggtttttttaggtttttgtggagaaacgggaaatttgaggggtaaacgtaggaagcgggttgggttaattgcgggcgatcgaggcgtcgttagcgggtggggagcgagaggggttagtagtcgggaagatttcggtttggagcgtttcgtgttttcgggtttgttggcggcgttgtaagtttaggttttggggcgcgagttaagttttttttgttagttttaaataaaattcgggggagaatgagtcggttagtttgggtatagggtgttttcgattgtcgggcggcgggcggaagcgtaggggttttgatcgtttttagaggtgttgagcgtatagggtagtggttgtagagtttcggcgcgaggttaattcggattatttacgttgggattttagtttgttcggttgtttttagtaataataatagtatgaaatcgagttttaaaaaattttttttcgtatttttttttatgtataagggagaataagtatttttaggtagttaaagaaaaaaaaagggtaggattttaggaaattttaatttttatggacgaggagtgaaggggaattcgttttttgttttttttgtttgtttgtttttagaagagaaaaaaaggaaattcgatatatatttttaaaaatttttttttaataatcgttaaaggttgtgagtgtgagtagagagttaggaaatcgagttttcgttcgcggtgatatcgggtttttgtttttttttttgaagttttcgcgattgttgatcgtgtagagataaaggtcgggttagggttttgtggaatttcgagggaggggcggcggggtcgttttattggttttttttaattttatgtaggggggttaggtgggtttagttgattttcggaataggggttataaggttaggggttgtttttatttttaggtttagacgaggtacggatttgtttttttttattttttcgaaaggtttttgtcgttaaattttttgtattttgtttttattagtattatattgttttatttaaagtttttggaggcgttagggatagtggttttttatcggattcgatttttagaaatggaatcgtgtttaatttttgtggcgattttggttttcgcgatcgttgggttcggttggtcggttagattcgaattcgtgtatcgtttgttttagttgcgttttttaggggcgtttttgtgtttttttcgggtcgcggagatttttttagcgttcggtttcgaattttttgcgtaacgtttttttgttagtcgtacggttttgtagagaaggcgggagagtgtttgtgattttgttttgtagttttcggtgatttaaaaatttaggtcgttgtggaatttagtttttacggtattgtttttgtaggtagtagttttgggtttatatttgaggtcgttttttttatagatatttttgggtgatgcgagtgttgcgtagtttagaatttttggaagtatgagaggaggacgagttcggcggtttgtcggtgcggtgatggagggtttttcggtagttatattgcgcgttttttatatatattttaatagttttggggtttcgggttagcgttgtagtttaaagagattttgtagtcgtatttttttttaggtcgtggtaaattttggtttcgtttttttttattatggtttgtgagggtaggaggttttcgggggtcgatttttttgatttgaatgagttaggtatttttttttattttaagtgggggtgtgatttgaggagataaaggaaggacgatagatttggggagtggggttttgtagttttttgggttcggagcgtattttttttcgttttttttttttatcggtaggatcgggggttttgaaattggagtcgtttatcggtcggcggatgagagataaaggagttcggcggcgtcgaagcgttgattagtagattcggattcggattttttcgcgttttagagtagtattcgaaattttattttttaggtggtatcgacggttgagtagttttttcggtgttatacggtgtttttaggtatagatagtcgtgttcgcgtgtgtattgtgtacgtataagattgtaggatgatgttttgtatgagttttgtattagtttttttgtttttagttagaggtatacgtatacgtgtgtgtatttgttaagtgtttagggataggtgtgtatttttatatatacgtgatgtgtatgtgtatatatttgtagaacgttttagtatttattttataggtacgtatagggttggttgtttttaataagttattattatatttcgtatttatataggtttttttagttttggtatgatttttagaattatttcgggaaatattttttttttaaagtttatagatgaggaaataagtaaaaagaatttaatgggtattcgtttgtatatattgtgagagagatcgaggttagttaaagatttcgtttattgttgaatttgggtgtgttggtcgaatgtgtttatagatgggtttgtttagcgttttaggcgattttaggttcggcgggttttgg

SEQ ID NO: 32 - DNA, 3952 bp, Artificial Sequence
  chemically treated genomic DNA (Homo sapiens)
ggtcgtagtcggagaggaataggaatcgtagtggggacgttttggttttcgggtttatagtattcgggacggacgcgtagtagcgcgggtcgggaattgggtattagggcgggatgggtgagaggttttaagggataaggtagggagaagcgtagcggggtgcggggaatcgtacgttttttttttgtttttgttttttatttcgaggcggtagggcgggcgggcgcggtttcgggggtgggcgggttgggcggggcggaggcggggtcgtagtattggttttatttagtttttttcgttcgtagttagagcgagtcgagtcgcggttagtttcggcgggtagggggggcgttggagcgtagcgtagcgtagttttattagttcgtaaagcggatcgagttggaagtcgagcgttgtcgcgggaggcgggcgatgggggtaggtgttatcggtcgcgttatggacgggtcgcgtttgttgttgttgttgtttttgggggtgagtgttagtcggagggggttcgttttttttttcgggattagaatttcgagaagagtcgggcgtcgttattaaggaaatagaatagagtattggggttttagatattgagggtgggtggtgggaaaggatttttgatgtcgggattacgaaggagggtttagggttttcggagcgtagaggcgattttttagggtggagatgagggtaagatcggagtacggatgtcggtttttaggtatcgtagggggcggtgggggagttgggaggggttttttaagagggggtatggggtttttcgatgtttaggtttttcggaagaggatattcgaatgtcgggatttcgaagggattttttttttagtatttcggtttttggagagtcgtgggatagaattaaggcgagagaaggagggggaattggacggggattagagatgagaggggcgagttgggttggggcggggagttcgggacgacgggatggaataatggaggaggtcggagggattggaggtagaggggattcggtaaggataatggggatcggttagataatgggggggaggggcgtcggagggagaggttggggagcgggagagaggttgagaagtgggttagggagggtagaagaggggcgacggcgagggcggtagagagatggaagtagaaggaaaggagatagagcggggcgcggattttgaagtggtcggggtttcgtttgttcgttgagggatagtgagacgagaagagagagtagaggtttggatatttttagcgtttgttttcgcgtttttgttcgcggttttttttagtttcggaattggggttgcggatttaaggttgggaggggagtgtttatttcgtcggggcgaattcgttttcggggtttttttacggtcggcgggttttttcgacgcgcgtgtttttacggtttgaagtagcgtagcggatcgcgagggacggagcgggtgtgtttttattcgggttggcggtggttacgtttcggggtgtagagcgtcggggcgtattaggcggggattttttttggtcgcgcgtagttttggttacgtaggcgggaggcggtaggtagggggcgttgcggggcgaggtaagtgtagttcgtcgttgtttgtttgcgagtttggggttgcgcgtcgttttttatttagttgcgcgattcgagcgtcgcgtttatcgcgtttcgtgggttttcgcgtttcgaagggtcgggattcggtttgagttttttttggttttcggtgtaagtcgttgggtatttaacgagacgggggcgttcggacgtttcggattttgtagcgcggtatttcgggttatcgattcggtaaaggtcggcgggtttttcgggtggttcgacgagattgttagatgtggtttgttttatggttatgaatcgaatgttttggaaggtttggtaacggaggaggcgtttttatttttttcgttagtattttttattagagtattgcgttttaaatttcggttttatagatacggagattgaggttttgagagtttaaacgatttggttaagattttatagtaagttgggttagagtcgtggttagatttttcgatttgatttttagttcggtatttttttatttttttagggggtagtcgttgttttagttcggggttacggttgcgttttttagtagggcggggggggttgatattgtttttagagttcgtcggcggtagagtttgcgggtgaggtgggtagagattttgttcgggtgcgggttttagttcgaaagtttagttttagttttttggagttgttaggatttgtggttgcgttcggggatttgggagcgatcgcgggtacgtttgttgattaacgtcgttggttagagacgttgtttagacgcgggtgggcgagcgtagattaggagagcggggaggagggatcggattttagaggggtaacgatttgggtttcgggtttgggtaagagcgagggttttcgcgcgaagatttaaggaaggaggggagttgggcgtggaggatttgggcgtttgggaaggtgtatttcgataggaatttgtcgtttgtagtttttgcggttttcgttttcgtttcggcgcgcggttgttcggtttgggatggttgtgcgcggttcgagtttttttttgggtcgcggtgagagagagagggttgaaattagagcgcgtttcggcgggtcggttggcgggtcgcgtcggtaatggaggtattttgttatttagacgtttgtaattagagtcgtcgggttggttaatgcgtttaatagggatggaacgagggtagtaaatgggcgtgcgtgagcggtcgggttgagttgggtggatggtggatggggaggtagtttcgcgggggacgggtttttatcgtattgttttagtttagtttggtttaagcgtttcgttttttttttgggggatcgcgtggggaggcgggaataatcgatgtgttgagtttttattaagtgttttgtatttttttggtagttttttttgaattatttaatttttataaggttttagtaaggtgaatttagttatttttatttcgtagttgaggaaatagaattttttagatttttaggttcgagattaggtttttttagtgagttagtggtggcgtttttgttggaatttaggatgtttggtttgggatgtttttttttttatatatgttaggttttttttcgttttttattttttagattatggaaggagtcgtggttttgagagattaaatcgtgttttatgtttttggttttatatatttagatttgagttttttttttatacgtagaggttttgtttttttttaagtttttatgttatattattttgggtaattagtttttttttttttaattttttttttatttaaagggagtgaggggtatgtgttagtgttttttttgggtttgtatcgattttaaaaggttttttaggtgtttgaaaattttttttattttatggcggtgattacggttttatttatttaagagttttttgttgaagttgttggaatggttagggttgattatattgaaatattcgtatggttttaaatatttttaattgtttcgttgttttttttttttttttaattaaaaaaaatgaaaatttttaaaagttaatttatttaaggatttttttattttagttttttgtaagttttgaaatggttaaaataaaaagattataagcgtttttaaaaatgagatgaaattattttgttaaatgtgaaatgattaagtgtaatatatataaattttagggaaatttatttgttatttttataaattaatttttttggatttgattttggagtaattagtttgaatgttagttatttttttttatttggttaaattttttttttttgtttggggtttttttaagatgagatgtttttttgataattaatatttatt

SEQ ID NO: 33 - DNA, 3952 bp, Artificial Sequence
  chemically treated genomic DNA (Homo sapiens)
aataaatgttagttattaaagaagtattttattttaaggagattttaggtaggaggggagagtttagttaagtagggaggggtgattaatatttaggttaattgttttaaaattagatttaaaaggattaatttatagggatgatagataaatttttttgaaatttgtatgtgttatatttagttattttatatttgatagaatgattttattttatttttaagaacgtttgtaatttttttgttttggttattttaaggtttataaggaattaaggtggaaggatttttagatgaattgatttttaagaatttttattttttttaattagagaaaagagagaaatagcgaaatagttgaaagtatttgaaattatacgaatgttttagtataattagttttggttattttaatagttttagtaaagagtttttaagtgaatggggtcgtggttatcgttatgggatgggagagatttttaaatatttggagggttttttgaggtcgatgtaaatttaggggaggtattggtatatattttttattttttttggataggggaggagttgggaggaaaggagttaattatttaagataatgtagtatagagatttgagagggggtagggtttttgcgtgtggagaaggggtttagatttaaatgtgtggggttaaaggtatagggtacgatttaattttttagagttacgattttttttatgatttagaaggtagggggcgggagggagtttggtatatgtaggaaagagaatattttaggttaagtattttgggttttaataaagacgttattattgatttattgggggagtttggtttcgggtttgaaagtttagaaggttttgtttttttaattgcgaagtgggaataattaaatttattttgttaggattttataaggattaaataatttaagagaaattattagggaagtgtaaggtatttagtaggaatttagtatatcgattattttcgtttttttacgcggttttttagggaagaagcgaggcgtttgagttagattgggttggaatagtgcggtaggggttcgtttttcgcggagttgtttttttatttattatttatttagtttagttcggtcgtttacgtacgtttatttgttgttttcgttttatttttattaggcgtattagttagttcggcggttttggttatagacgtttgaatgataaagtgtttttattatcggcgcggttcgttagtcgattcgtcgggacgcgttttggttttagtttttttttttttatcgcggtttaggaagaaattcggatcgcgtatagttattttagatcgagtagtcgcgcgtcgaggcggaggcgggagtcgtaggggttgtagacggtaggtttttgtcggggtatatttttttaagcgtttaggttttttacgtttagtttttttttttttttgggttttcgcgcggggattttcgtttttgtttagattcggagtttaagtcgttgtttttttgggattcggtttttttttttcgtttttttggtttacgttcgtttattcgcgtttgagtagcgtttttaattagcggcgttagttagtagacgtgttcgcggtcgtttttaaattttcggacgtagttataggttttgatagttttagggaattggggttgagttttcgggttggggttcgtattcggatagaatttttgtttattttattcgtaggttttatcgtcgacggattttggggatagtgttaatttttttcgttttgttgggaaacgtagtcgtgatttcgagttgggatagcggttgttttttgaaaaggtgggggagtatcgagttgggaattaggtcggggagtttagttacgattttggtttaatttgttgtgagattttggttaagtcgtttaaatttttagagttttagttttcgtatttgtaaagtcggaatttggggcgtagtgttttgatgaaagatgttggcggggagagtgaagacgtttttttcgttgttagattttttagggtattcggtttatggttataaagtaggttatatttgataatttcgtcggattattcggaggattcgtcgatttttgtcgagtcggtggttcgggatatcgcgttatagaattcgaggcgttcgggcgttttcgtttcgttaggtgtttagcggtttgtatcgagagttaggagaggtttagatcggatttcgatttttcgaggcgcgggagtttacggagcgcggtgggcgcggcgttcgggtcgcgtagttaggtggggagcggcgcgtagttttagattcgtaggtaggtagcggcggattgtatttgtttcgtttcgtagcgttttttgtttgtcgtttttcgtttgcgtagttagagttgcgcgcggttaggaagggttttcgtttagtgcgtttcggcgttttgtatttcgagacgtagttatcgttagttcgggtaggggtatattcgtttcgtttttcgcgattcgttgcgttgttttaagtcgtgagaatacgcgcgtcggaggagttcgtcggtcgtgggggaatttcgggagcgggttcgtttcggcgaagtgggtattttttttttagttttagattcgtagttttaatttcgggattgggagaggtcgcgagtaggagcgcggggataggcgttggaaatgtttaagtttttgtttttttttttcgttttattgttttttagcgggtaggcgggatttcgattattttagggttcgcgtttcgttttgttttttttttttttgtttttatttttttgtcgttttcgtcgtcgttttttttttgttttttttaatttattttttaatttttttttcgttttttaattttttttttcgacgttttttttttttattgtttggtcggtttttattgtttttgtcgggttttttttgtttttagttttttcgattttttttattgttttatttcgtcgtttcgggtttttcgttttagtttagttcgttttttttatttttagttttcgtttagttttttttttttttttcgttttggttttgttttacgattttttagagatcgagatgttgaggggaaagttttttcgggatttcggtattcgagtgttttttttcgaagaatttgggtatcggagagttttatgtttttttttgaaagattttttttagtttttttatcgttttttgcggtatttgaggatcggtattcgtgtttcggttttgtttttatttttattttggagagtcgtttttgcgtttcgggaattttagattttttttcgtggtttcggtattagaggtttttttttattatttatttttagtatttgggattttaatgttttgttttgtttttttggtggcggcgttcggtttttttcggagttttgatttcgggaaagggagcgggtttttttcggttaatatttatttttagaagtagtaatagtagtaggcgcggttcgtttatggcgcggtcggtggtatttgtttttatcgttcgtttttcgcggtagcgttcgatttttagttcggttcgttttgcggattgatggggttgcgttgcgttgcgttttagcgttttttttgttcgtcggagttggtcgcggttcggttcgttttggttgcgggcgggagaggttgggtgaagttagtgttgcggtttcgttttcgtttcgtttagttcgtttattttcggaatcgcgttcgttcgttttgtcgtttcggggtgggaagtagaggtaaagggagggcgtgcggtttttcgtatttcgttgcgtttttttttgttttgttttttagagttttttatttatttcgttttggtatttagttttcggttcgcgttattgcgcgttcgtttcggatgttgtgggttcggggattagggcgtttttattgcggtttttgttttttttcggttgcggtt

SEQ ID NO: 34 - DNA, 2820 bp, Artificial Sequence
  chemically treated genomic DNA (Homo sapiens)
tttaggggataatatttaggtatgttaacggagtttaaaatgttaaggaaattatattataattttgtttagtatattataggttgttaaatcgaaatgttatgttagttaggagtgtagtaatttttattttttggttttatttaattaggaagttttagtagagcgaagtttgttaagcgttcgtcgttagaatttgaaggaattcgagcgagtaagaagagtgtttgatttattttatagaagtttgtttagaaatggaggagttagcgtttattgaagtcggtttcgttttcggttcgtttatatggagtttgattagttttagttatgtttatttcggtttgggagattcgtaaagtgtttttttttttaatttttttgtattattttgaagtttagggaagtaaagagaggggtatatttggattgtaaaattaatgttttttgtcgtttaggagagaagggaatgagagagagagagagatagatagatagagagagagagagagagagagagagagagagagagagagagagagaaattttattgaaatttagtttttttagaatttgtgtgatttggtttttaacgggagattagtgcgattttatggtatttttgttaggaattagcgatttttttgtagttattatttgatttattgttttttcgtttatttttttttataaagttattttttttttattttagtaagatttttttttttaatgatgataaagtttttgttttagtgttttttttaggattggtgtttttttaaaatagtgaatttagaaaattatttcgtttaatattttttaaaattttcgtagttttaatgtaagcgtaagtatgtaaaggttttttgttatatttgtattttttgtttattttagaattattttttattttcgggtttgtaatagttttttttgtttttttggatagaggtgggtggtattaggggtttagggtagtaggaggtgaggggttgaggaggtcgttagggtaggttggtttgtgttggatacgcgtgtttttttgcggagttaaagggtcggggacgggggttttggatttattagagtaattttagtcggtgggcgtttggtagttatttaaggaggtagggaaagtagcgagttttatcgggcgggttacgatgagtagtatgacgggtagtagtagtagttagtaaaagttttcgtaaagtgtttagttgttgtattgtcgcggggatttttatagtattatgattagttcgtgtaattttgtagtagtaaacggttttcgaggaatataggatcgcgggggtcgggtagcgggttattgagtatttcgcggacggcggtagtagaggcggcggcggtggtagtggtattcggcggggaagtagtagttaaattcgcgtatgatttcgagagttttagtaatatttagggattgggtttagtttcggagcgagagggtcgttcgttgagaagttgcgtcggagacgcgggaagttgttgttataaggagggagttttgggaagtcggaggataggaggagacgggagtttaggggtagacgagtggagttcgaggaggtagggtggagggagagttaaggcgtttcgtagttcggtagtcgtttttcgagttttgtcgttcgtatttttttggcgtttgggaagtagtaggtttttagttcgttcggggttacgtgggaagaggtagtcgggttttgattggtggagtaggatgtaggtttcgggagggaggggtcgacgaggaggtgtaaggatgtaaggaggaggcggtcgcggaagttatagatgggttcgttcgttaggcgttggttcgagtggggttaggcggggatggtttaaatgagaagttcgggttttagggtgggttattcgtatatttatatattattcgttttatttttcgttttaggacgttttttatcgaaggcggggttcggattagcgtttttttttcgcgcgtgatttcgggtcgcgagtgcgggtcgcggttgggtggcgttttttcgagttggagatggtgggggcggaggtgttagaggagtagtagtagtagggtagagaggggcgagtcggcgcgggagagggcgttttgttggcgatcggcgttttagcgtgcgggagcgcgtcgtttaggttgtagggggatgtaggttgggaatgtcgcggcggagaggttagggacgtttttttagggatttataggaaagagggtgagaggcgatggtgttagaatcgtttttgtcgatttggaagtaatagtagtattttttataagagcgtgtaattttaaggttgttcgtcgaggtagtttagttatttcggtaggcgttttttttttttttttttttttttttttttttttttaggtttttcgtagtttcgatttagtttaagcgttcgtaggtttgaatttttttttttattattcgtttttttttagttcgtagtttattagtgtgtttatttgggaggtgcggttagatgtgtttggaaggttagattggtcgggataagtggtttgagagaaagagaaaggtttttttgtatacgtcgcgggtgggttgtcgggagtatcggtcgggtagcggcgttcgggaaggggagagcgggttttatttgttggtttaggtagtgattttgcgttttttattcgggtttttgtcggatggtcggtgatttggggcgacgagagaaggtttaattcggtaggagtttttggttttgcgcgttttttttattttttttagcgggaagggtaaacggtatagcgggattcgtttttcg

SEQ ID NO: 35 - DNA, 2820 bp, Artificial Sequence
  chemically treated genomic DNA (Homo sapiens)
cggaaggcgggtttcgttatgtcgtttgtttttttcgttggagagaatgaaagaaacgcgtagagttagagatttttgtcgagttagattttttttcgtcgttttaggttatcggttattcggtaaagattcgagtaaggaacgtagggttattgtttgggttaataaatggagttcgttttttttttttcggacgtcgttgttcggtcgatgttttcggtaatttattcgcggcgtatgtagaggagttttttttttttttttagattatttgtttcgattaatttgattttttaaatatatttgatcgtattttttaggtggatatattaataggttacgggttggagaggagcgggtgatgaggagagggatttaaatttgcgaacgtttgggttgggtcggagttgcggggggtttgggaggagagaggggagaagagagaaggaaggagagcgtttgtcgggatggttgagttgtttcggcgagtagttttggggttgtacgtttttgtgggagatgttgttgttgtttttaggtcggtaagagcggttttaatattatcgttttttatttttttttttgtaaatttttagagaaacgtttttggttttttcgtcgcgatatttttagtttgtatttttttatagtttaggcggcgcgttttcgtacgttggagcgtcggtcgttagtaggacgttttttttcgcgtcgattcgtttttttttgttttgttgttgttgtttttttgatattttcgtttttattatttttagttcggagagacgttatttagtcgcggttcgtattcgcggttcggggttacgcgcggaagaggggcgttagttcggatttcgttttcggtagggggcgttttggagcggagagtgaggcgaatggtatatgagtgtgcgggtagtttattttgaagttcgagttttttatttgagttattttcgtttagttttattcgggttagcgtttggcgagcgagtttatttgtggttttcgcggtcgttttttttttgtatttttgtattttttcgtcgatttttttttttcgggatttgtattttgttttattaattagagttcgattgtttttttttacgtgatttcgggcgggttgaggatttgttgttttttaaacgttagagggatgcgggcggtagagttcgagaggcggttgtcgggttgcggggcgttttgattttttttttattttgttttttcgggttttattcgtttgtttttggattttcgtttttttttgtttttcggttttttagagttttttttttatggtagtagtttttcgcgttttcggcgtagttttttagcggacgattttttcgtttcggggttgagtttagtttttggatgttgttgaaattttcgagattatgcgcgggtttggttgttgttttttcgtcgggtgttattgttatcgtcgtcgtttttgttgtcgtcgttcgcgggatgtttagtagttcgttgttcggttttcgcgattttgtgtttttcggaagtcgtttgttgttgtagagttgtacgaattagttatggtgttgtgggagttttcgcggtagtgtagtagttggatattttgcgagggtttttgttggttgttgttgttgttcgttatgttatttatcgtagttcgttcggtgaagttcgttgttttttttatttttttaagtgattgttaaacgtttatcggttggaattgttttggtaagtttagaattttcgttttcgattttttaatttcgtagaagaatacgcgtatttagtatagattagtttattttagcggtttttttagttttttattttttattgttttagatttttaatattatttatttttatttagagaaataaggggaattgttgtaggttcgggggtgaggggtggttttgggatgggtagaaagtgtaggtgtagtaggaaatttttgtatgtttgcgtttatattggagttgcgaggattttgagaaatattaaacgggatggttttttgggtttattgttttgaaagagtattaattttaggggaaatattgaaatagaagttttgttattattaaagaaaaaagttttattaggatgaggaagaaataattttatgagaaagaatgagcgagaaagtaataaattaaatggtgattgtaggggaatcgttgatttttggtaaaggtgttatgaggtcgtattggtttttcgttgaagattaggttatatagattttagaggagttgggttttaatagaatttttttttttttttttttttttttttttttttttttttttttttttttatttatttattttttttttttttttattttttttttttttaggcggtaaaagatattggttttgtagtttagatatgtttttttttttgtttttttaagttttaaggtagtataggggagttgagaaaaagaatattttgcgggttttttaggtcggagtgggtatgattgaggttggttaggttttatgtaggcgagtcgagggcggaatcgattttagtgggcgttgatttttttatttttggataggtttttgtggagtgggttaggtattttttttgttcgttcgggtttttttagattttgacggcgaacgtttggtaggtttcgttttgttgaagttttttaattaaatagggttagaggatgggagttgttgtatttttagttggtatagtatttcggtttgatagtttgtagtatattgggtagaattgtggtgtaatttttttggtattttaaatttcgttaatatgtttgggtattgttttttagg

SEQ ID NO: 36 - DNA, 3104 bp, Artificial Sequence
  chemically treated genomic DNA (Homo sapiens)
gcgggcgttgtcgagtacggggaggtgttgaaatagttttggcgtgttgatttaagttttgattggtagagttattcggtgattgatagggggtttttatggcgttcgcgtcgttaattcgtttattttaatagcggagttagttcgtttgtcggcgtgtttgagtcgagtcgagttcgaattttaagtcgcggagttagtattttttttagtcggggtcgttcgttttcggtcgttgagttatcgtcgttattcggtagtgtgtttcgttgttttaattcgttttattaataagcgtttggtatatttagttaggttcgcgggtatttgttgcgtgtttcgtttcgggtttagtgttttcgtcgtcgtcggtattgtttcgatgttttagttgtttattttgaattttagtttttagtaagtggtcggggtatgtgagattttggaagagagcggcgatgtggagcgtttgggtcgttttttttggtcgttgttcgtggtttttgcggtttgcgaggtttttaataagaatgagtcggtgttacgcgtacgagttatcgtggttttttacggtggtaattatcgcgagttttattatattttggaaaattataagtttattaaggagtcgtacgttaagttgtaggcgttgtggtttgaagtatattattaggaggttgagaagttgcgtggaagatttttgggatttgtggataagtatcgagtaaggaagaagttttcgttgtcgcgtattatttgggacggcgaatagaagatatattgttttaaggagcgtacgcggtatttgttacgcgagtggtatttgtaggatttatattttaattttagtaaaaaacgtgagttcgtttaggtaatcggattgatttttacgtaggtgggtaattggtttaaaaatcgtcgataaagggatcgagcggttgtagttaagaataggtcggtatttagaggttttcgcgttttgagcgtatcggggaggaggcgggtggaggtatttttggcgtttttatttagtttttggcgattttaatttagtaggagttgggagcgcggtttgttttgggttaagagttttgcgttttgggtttttggtcgggagtttttttgtcggttttgtttttttattcgttggttttttacgtttgcgggtagttgtagtagttggtttcggttattaaattaaggttttattgggacggagaggggaagagaaataaaaaattaaaattttataaatagttagggattttaagatttaaagttaatttttgttagtttgggtataggtttttattattaatcgaagtttggtttattagtaatgtgtcggttttatgttaattattatttttaaagtttaggtatatttttttttaatgttttgaaaatagtttttaatggatttttgagaaatgggaagtcgagtttttttttttttatgcgttgtttgttatttttgttttaaaatagtaaattagttcgtgggtcgaggtttttcgtttttcggagtgtggatttcgattagttaaatattttgcggaagagttcggttttattttttaggtttaaatgttttttataattttttttgtttttaggtcgggtcgattcgatttaacgcgatcgcgggagtatttgtttaggcgtaagttttaggtagacgtatcgttagaaatggtattttatgtttttgggatcgatttgtttttgttatttatatttcgtttattttttgatagttttgtaaattttttaaaagtgtataataaatagggaggatattgtaagtttagtatataaaagatttgggagttgcggcgttgagaaagggcgcgaattatggtggggtataatagtagggattcgcggaggggcggtcgcggatttttgttcgatttttgtcgttttgtcgagtaattttcgttttaattgttggggttttcggaagaatttttagtcgtcgggttggagggacgtaggaggtggtgggggcgggcgacgggcggttgtgttacgagttgtgattcgtgttttttttttttttcgtagattttagtagtaggttttgttatagggtttcgggcgggtattacgggcggagggcgacggtacgttagaggtgttgggcgtcgttattagttcggtcgttagtttatttagtaaggcggttattttagttatttttattacgtttagcgatagcgagtgcgatatttgagttgtttatttaggatgtttagaagtagattttagtgtaaaaacgagaaaaataaaatgaaagaggggaagaagatgagagatttgtaaatttagcgttatagaagttaggtgattagggattcgcgggttcgggttgtcgtttttcgttttatttcgcggtcggtttggttttattggcgttttttggtcgcgattacgggaattagcgtgaggtttgatttagtattacgttttttttgttttgtttttttttaaggattttgttgtaaagttttttcggaattcgaattgtaagttgagcgtttgtttagatttttttatgggtattttacgtcgaaaggacgttgttatatatgtataattttcgttttaaagtttttttttaataaaatatatatatgttgtttatttatttatttaagagatcgttatggtaggtttttttgtagtttggggaatttgttgtttttaaatatgtaggttggtggtgatgggttttgtgtggagaagttaaataataaaataatttagtgggtaatttttttaattaagggagttgtttttagattttttttttttttattattattaatattattttttttattaggtatgtagggatttttgagtaaatggttttcggaaggttttatttatatattttttgttttttttggtgttttttggtatatgttttaaataatttatggtaggtttataattattttttacgttaaattatacgtatgtgtatatatgtatgtatttatataaatatatgtatgtatttatataaatatatgtatgtatgtatatacgtgatatatttaaggttagaaattggtaatatgtgagcgtttttttta

SEQ ID NO: 37 - DNA, 3104 bp, Artificial Sequence
  chemically treated genomic DNA (Homo sapiens)
tagagaggacgtttatatgttgttaatttttagttttaaatatattacgtgtatgtatatatatatatgtttgtataggtatatatatatgtttgtataggtatatatatatatgtatatacgtgtaatttgacgtgggaggtggttatagatttattataggttgtttaaaatatatattaggaagtattaaagaaggtaaaagatatataggtaagatttttcggagattatttgtttaagggtttttgtatgtttggtgaagggaatgatattaataataataagaagaaaaggaatttgagagtagtttttttaattaagaaggttgtttattaggttgttttattgtttggtttttttatatagaatttattattattagtttgtatgtttagaaatagtaagttttttaagttatagagaaatttattatggcggttttttaaataagtaaataaatagtatatatatgttttgttaaaaaaaaattttaaagcgaaagttatatatatgtaatagcgttttttcgacgtgaaatatttatgggagaatttgggtaggcgtttagtttgtagttcgggtttcgaagagattttgtagtaaaatttttaggaaaaagtaaagtaagaagaacgtggtgttgggttaggttttacgttggttttcgtggtcgcggttaaagggcgttagtgaagttaggtcggtcgcggggtggggcgggaaacggtaattcgagttcgcgggtttttggttatttggtttttgtggcgttggatttgtaggttttttatttttttttttttttttattttgtttttttcgtttttatattggaatttgtttttgagtattttggatgggtaatttagatgtcgtattcgttgtcgttggacgtgatggagatggttgaagtggtcgttttgttggatagattggcggtcgggttggtggcgacgtttagtatttttggcgtgtcgtcgtttttcgttcgtagtgttcgttcggaattttgtgataggatttgttgttggagtttacggggaagaaagggaatacgggttatagttcgtaatatagtcgttcgtcgttcgtttttattattttttgcgtttttttagttcggcggttagaggttttttcgaagattttagtagttaaggcgaggattattcggtaaggcgatagaggtcgggtaggagttcgcggtcgttttttcgcgggtttttattgttgtgttttattatgattcgcgtttttttttagcgtcgtagtttttaggttttttatatattgggtttgtagtgttttttttgtttgttgtgtatttttgggagatttataggattgttaggaaataaacgaagtgtgggtgataaggatagatcggttttagggatatgggatattatttttaacggtgcgtttgtttggggtttacgtttgagtaagtgttttcgcgatcgcgttggatcgggtcggttcgatttaaaggtaaaaaggattgtaaggagtatttgggtttgggggatgaggtcgggttttttcgtaaaatgtttggttaatcgagatttatatttcgggaaacgaaaagtttcggtttacggattagtttgttgttttgagataagagtggtaggtagcgtatgggaagaggaaaattcgattttttattttttaaaagtttattgaaaattgtttttaaagtattagggagggatatatttgggttttgaaaatgataattaatatgaaatcgatatattgttaataagttaggtttcgattaatagtaggagtttgtgtttaggttgataagaattagttttgggttttggggtttttaattgtttgtaggattttaattttttattttttttttttttttcgttttagtgaagttttggtttggtgatcgggattagttgttgtagttgttcgtaggcgtggggagttagcgggtggggaagtagagtcggtaagggaattttcggttaggagtttagaacgtagggtttttaatttaagatagatcgcgtttttaatttttgttgaattggagtcgttagggattgggtaagggcgttagaggtgtttttattcgtttttttttcggtgcgtttaaagcgcggaggtttttaggtatcgatttgtttttggttgtagtcgttcggtttttttgtcggcggtttttgaattagttgtttatttgcgtaggggttagttcggttgtttgggcgagtttacgttttttgttggggttagggtatggattttgtaggtattattcgcgtagtaggtgtcgcgtgcgttttttgaagtagtgtgttttttgttcgtcgttttaaatggtgcgcggtagcgggaattttttttttattcggtatttgtttataggttttaggggttttttacgtagttttttagttttttggtagtgtgttttaagttatagcgtttgtagtttggcgtgcgattttttggtgaatttgtggttttttaggatatgatagagttcgcggtagttgttatcgtgaaaggttacgatggttcgtgcgcgtagtatcgatttatttttgttgagggtttcgtaggtcgtaggggttacgggtagcgattagaggaagcgatttaggcgttttatatcgtcgtttttttttagggttttatatatttcggttatttgttgggggttgaaatttaagatgggtagttggaatatcgaggtagtgtcggcggcggcgagggtattgagttcggagcgggatacgtagtagatgttcgcgggtttggttgagtgtgttaggcgtttgttgatgaggcggattggggtagcgggatatattatcgggtggcggcggtggtttaacggtcgggagcggacgatttcgattggaggaggtgttggtttcgcggtttggggttcgggttcggttcggtttaggtacgtcggtaggcgagttggtttcgttattggggtgggcggattggcggcgcgggcgttatggagattttttgttagttatcgggtggttttgttaattaaagtttgaattagtacgttaggattattttagtattttttcgtgttcgatagcgttcgt

SEQ ID NO: 38 - DNA, 2378 bp, Artificial Sequence
  chemically treated genomic DNA (Homo sapiens)
attttgagattttagttgattttttttgttttgtaattagaggggattgtgatttgggttaattttttttttatgggttttagtggagttagttgtggaatggaatattaatttttattttataggtatgttgtgaggtttcgttaagaaatagttataaaagggttttaagagttatgatgattgttttaattatttagtagggagggggtatttagcggtgttgtttttacgtatcgatgttacgtggggcggggaggcggggcggagaacggagagcgtttttttattttttattttttttttttaagtttagcgtagggggaggtggttgcgattgattgaggggttagggaaggttggttaggggcgtgggcgtggttggggacggtttgggggtggggttgcgtaggaggttggaggagtttcgcgggatttagaggcggggcgtcggttcggggattattgttttttcggggcgtggttgtaggaggttggaggagtttcgcgggatttagaggcggggcgtcggtcggggatcgttgttttttcggggcgtggttgttgtcgagtattttttagtttagtcgagttcgtgtttaggttacgttttgttttagtcgtcgttttttttattttacggcgttcggagttatttttcgtttgttcgtttttttttttcgtttattttttgtatttgggtttgtattatttttgttaatcgttttttcgattttgtcgatattttttttttaaatttttgatcggtatttttgtttggtatttttttttttatttttttttttttatttttttttttcgatttttttcgggtttttttttttttaaaattcgggttttttcgcgtggtttcgtttttaggtcggggatgtttttcgcggtttcgcgtttatggttttgacgttgttttttttcgtttataagttgtgtcgttttttcgttatgtcgggtttacggcggggcgtcgagcggttggcggtgtttgggttagatgggggcggtggtacgggtttatggtgggttgcgggtggttcgggttcgcgaaagtgtcgtcgggggtaggtatcgaggtgtaggacgttttggagcgcgcgttgtcggagttgtagtaggttttgttcgcgttgaagtaggcgggcggcgcgcgggtcgtgggcgtcggtttggtcgaggttttttaattggtggaggaggtttggttgttgcggtcgtgggtcgcgaggtagtttagggtttgtgcgacgttattcgtttcgatggcggtttcgatttgttgttgcggttgttgtaggcgtcggagttggagacgcgtgtgtaggtcgcgcgtttgttggagtagattttggtggttgagaatcggtgagcgcgttaggtcggggttgggagagcgtcgcgtggtgtggatagttaagcgtttgcgttttcgtgtgttttgcgtcgtgtttttgttttttttatttttttgattgtttgtattatatttttgttaggggttagtttgtttgttttatagataaggaaattgagttttgggaaagtttagtgatttgtttagtggattatagtgaattaagatttgtttttagggttagtggggtgaggaatggagttataggataggagttcgtttttggttttatggatggagatggtattttattgttaattttttttttttttcgttttttaagtttatagtttttttttttatcggtttgggttttcgtttatgatattttttttcgttattattttattttttttttaatgagagaagaagggaaatataacgtttagaaaagagggagggagatttttttttttttttttttttaggttgtaaggcgtgttggtttgaggttgtttattttttttttgtcgttttaatttaatttttgttttattttttattttggtttttgtaataggttagatatgattttattttgtagttgttgatgggaaatagttttttgttgggaggtatgggtgggggaagaggatatcggggtgtagagttcggcggggattaggtagagtgtgtgttttttttttttattttatttagtattaagatgtcgtaagagggttaaatagaggtttggttgttatttttgtatgttttttgggattttttttggagtatgaagatttttaaggatttatttttttttttttttgatgttagagtagattaagttgttatattttagttttatgttgaagtttttagttttttaagtttagaagagtttttggaagagttatttttagtttatgtagtttttataagtgtgaagggagtgggttgggggtgttttttttgttattttcgaaaagaaaaaaattatttggtg

SEQ ID NO: 39 - DNA, 2378 bp, Artificial Sequence
  chemically treated genomic DNA (Homo sapiens)
tattaggtaattttttttttttcgaaaatggtaaggaaaatatttttaatttattttttttatatttgtgagagttgtatgagttgaaagtgatttttttaaaaatttttttaagtttgagaagttggagattttagtatgagattggagtgtgatagtttggtttgttttggtattagaagggagggaaagtgagtttttggaggtttttatattttaggagagattttaagagatatgtaagagtggtaattaggtttttgtttgatttttttgcggtattttggtgttaagtggggtgaagggagagaatatatattttgtttggttttcgtcgggttttgtatttcggtgttttttttttttatttatgttttttagtagaaaattgttttttattagtagttgtagaatgagattatgtttggtttgttgtaagaattagaatgaaggatggagtagaagttggattggggcggtaagaagggagtaagtagttttaggttagtacgttttatagtttggggaggagggaaaggagaggttttttttttttttttttgagcgttgtgttttttttttttttttattgggagagggatgggatgatggcgagagaaggtgttatagacgggaatttaagtcggtgggaaggagagttgtgggtttggggggcgggggagagggagaattggtaataggatgttatttttatttatagagttagggacggatttttgttttgtaattttattttttattttattagttttgggagtaaattttagtttattgtgatttattgagtaagttattaaatttttttaaggtttagtttttttatttgtgaaatagataggttgatttttaatagagatgtagtgtaggtagttagagaggtgagggaggtaaaggtacggcgtaaggtatacgggaacgtaggcgtttaattgtttatattacgcggcgtttttttaatttcggtttggcgcgtttatcggtttttagttattaggatttgttttagtaggcgcgcggtttgtatacgcgtttttaatttcggcgtttgtagtagtcgtaatagtaggtcgaggtcgttatcgaggcggatggcgtcgtatagattttgggttatttcgcggtttacggtcgtagtagttaggttttttttattagttggaagatttcggttaggtcggcgtttacggttcgcgcgtcgttcgtttgttttagcgcggataaggtttgttgtagtttcggtagcgcgcgttttagggcgttttgtatttcggtgtttgttttcggcgatattttcgcgggttcgggttattcgtagtttattatgggttcgtgttatcgtttttatttggtttaggtatcgttagtcgttcggcgtttcgtcgtgggttcgatatggcgaagaagcgatatagtttgtaggcggagagaagtagcgttaggattatgggcgcggggtcgcgggggatattttcggtttggaggcggggttacgcggagagattcgggttttgggaaaagagggattcgagaggggtcggggaaagaagatggagggggaggaatggagagaagggtattaggtaagggtgtcggttagaagtttgggggaggagtgtcggtaggatcgggggagcggttggtaaaggtgatgtaggtttagatgtagggagtgggcgaaaggagagagcgagtaggcgagggatggtttcggacgtcgtagggtagaggaggcggcggttggaataaagcgtggtttgggtacgggttcggttgagttgggagatgttcggtagtagttacgtttcggaggagtagcggttttcggtcgacgtttcgtttttgggtttcgcggggtttttttagttttttgtagttacgtttcggaggagtagtggttttcgggtcgacgtttcgtttttgggtttcgcggggtttttttagttttttgcgtagttttatttttaagtcgtttttagttacgtttacgtttttggttagttttttttagttttttagttagtcgtagttatttttttttgcgttggatttggaggaagggggtggagaatgagaggacgtttttcgtttttcgtttcgttttttcgttttacgtgatatcggtacgtgggagtaatatcgttggatgttttttttttattaaatggttaaaataattattataatttttaaggtttttttatggttgttttttagcgaaattttataatatgtttatggggtgggaattgatgttttattttatagttgattttattgaagtttatgaggaagaaattggtttaaattatagttttttttgattatagaatagaaaaagttagttaaaattttaggat

SEQ ID NO: 40 - DNA, 2436 bp, Artificial Sequence
  chemically treated genomic DNA (Homo sapiens)
agttttggatgataaggattaattgtttagggcgttggtcgagaggaataggaagagcgtttcgtggagtagggcgggcgagaagagtcgggcggtcgcggggttttcgcgtatgttgggtaggaagaggaagagttgtagtacgaaggttattagggagatgtataagaagtaggcgggggttattacgttgagtagtcgtagggttagtattttcgattatatttttgcggggttcggggtgagaagaggattgattgattacggcgtttagggggcgttttcgttcgttttttcgtgtcgcgcgtttggggtattgtacgcgattttacgtttttaattttttgtttcgcggattttttttttttagttttttaatttcggattaggtaggttagagattcgagttcgtagcggtttcgggtttaggttttatttgggggtgagtgttgtttggggttttgagcgagttcggcgttttggcgcggtagagtttggtataggagggagggattcgtttgtagtttttaggagttgtgagggtggggggtatcgggggataggattttttttttttgtggatgtggaaataagtttaggtttgggatttttggtttagatttttttaggaggagaaagggaaggatttggggtcgggggtaggagaattagcggtatttgatttgttggaaattttgttttatattttttttttttcgtttttgcgtttttatttatatatatattttgggtagtatttagggattttattaggttatttaaggttttttggaggtatgtgtgcgtgagggattacgatgtgtgtgtgtgtgtttttgtttgtgattttgtacgtgtaatttgtgtgcgtttgagtatttgtatttgtgtatgtatatatttgcgtgtatagatacgtagtttttgttatttagttttaaaaaaattaattgaaataatcgatatatttatattcgttttcgggtatcgggtgaggtgggggcgtaattagaatatttgtgttagcgggttttggttagtatatttttttaacgttggttgttcgggttatttttttgcgaagagcgtttttatttgaggcgaaattaaaatttttttttcgcgttcgtttttcgtttttttgttgagagaaatttaaataatttttatggcgtcgaaattttttttatgtcgataagttcgttttgggcgtacgagtggatgtttggttagttttttttgggatcgatttcgtcgtcgtgtttagtttttattacgtttttattttattttacgttttatagtcggggtttttggttagtttcggaagttatcgagaaataggatttcgtgcgttcgagagaatttttttaggggttaaggaatcggttagtcggaggcgcgagaaaagttttgggaaggcggttgtatttaggatgggtggatgttacggggttttcgtttaggttgtttcgttcgtacgggtcgattggttattttggaattttttttgtaggttttagcgtttttcgggaattcgtagttttcgcggagagcgtgggtttttttttatcgttggggcgtagcgtagtgtacgtttgagggtggtcgtcgggggttgggtacgtttttagttttgcgtcgtcgggggttgcggcggtgttgtttattttagagagttttcggtttggggtttcggcgaagtaagtgttttttcggcgtcggtcgttaggggggcgcgggagtagttagatgcgtcgtagcgttgggaaggcggcgaaggataggggttaggggagtgaggggcgttcggtaggtagttttagttttggttttgcgcgggagaagggatagtagagatcgttcgtggggtttcggggtgtagggagttgttcgtttagttttggcgttcgtttcgttcgcggtagagggcggtatagtcggagttttggaaagatcggtagcgtcggtagtcgcgggtttttcggttattgtttttcggacgtacgggaagtcgtttttcgcgtcgtcgtcgtcgtattgtcgtcgtcgtagaggggtgaggaaattaatttatcgagttttggtcgtcgataagaggagtttcggacgtcggttttcgttttgttcgaggttgtaaagttgtggattcggttcggttggttcgtagtttgcgtttcgtttcgggaattgggtaagtagcggggatgtggggaggagggagcgggtagttgttggttttttatttgggcgttagcgagtaagggttaggaagcggcggggatggtagttgggtattttttagtttcgttattttttttttcgtttttgggggcggtgttttggtcgttagttttagtatcgtggatttgttttttttttttttttcgattttttttgagcgggttggggcgttttgtttggttttagcgttcg

SEQ ID NO: 41 - DNA, 2436 bp, Artificial Sequence
  chemically treated genomic DNA (Homo sapiens)
cgggcgttgaaattaggtagggcgttttagttcgtttaaggggaatcgagaggggaggagggggtaagtttacgatgttgagattggcggttagagtatcgtttttaggagcggagggaggggtggcggggttggggggtgtttagttgttattttcgtcgttttttggtttttattcgttggcgtttaagtgggaagttagtagttgttcgtttttttttttttatattttcgttatttgtttagttttcgaagcgaagcgtaggttgcgagttagtcgggtcgagtttataattttgtagtttcgggtagggcgagagtcggcgttcggggttttttttgtcggcgattagagttcggtgagttgatttttttatttttttgcgacggcggtagtgcggcggcggcggcgcggggggcggtttttcgtgcgttcgggaggtagtggtcgagaagttcgcggttgtcggcgttgtcggtttttttaaggtttcggttgtgtcgttttttgtcgcgggcgaggcgggcgttagggttgaacggatagttttttatatttcggggttttacgggcggtttttgttgttttttttttcgcgtagggttagggttgaggttgtttgtcgagcgttttttatttttttagtttttgtttttcgtcgtttttttagcgttgcggcgtatttggttgttttcgcgtttttttggcgatcggcgtcgggaaggtatttgtttcgtcggagttttaggtcgagggttttttggggtgggtagtatcgtcgtagttttcggcggcgtaggattgggggcgtgtttagttttcggcgattatttttaggcgtgtattgcgttgcgttttagcggtagggagaggtttacgtttttcgcggaggttgcgggttttcggggggcgttgggatttgtaaaggggattttaaggtgattagtcgattcgtgcggacgggatagtttggacggaggtttcgtggtatttatttattttaggtgtaatcgtttttttagaatttttttcgcgttttcggttggtcgattttttagtttttggaaaagttttttcgggcgtacggaattttatttttcggtggttttcgaagttggttaggaatttcggttgtgaggcgtggggtgggatggggacgtggtgagggttgagtacggcggcggggtcgattttaggaaaggttggttaagtatttattcgtgcgtttagggcgggtttgtcggtatggaaaggatttcggcgttatgagggttgtttgggttttttttagtaggagggcgggaggcgggcgcgaaggggggattttaatttcgttttaaatgaaaacgtttttcgtaaagaaatagttcgggtagttagcgttggagagatgtgttggttaggattcgttgatataggtattttggttgcgtttttattttattcggtgttcgagagcgagtgtgagtgtatcgattgttttaattgatttttttaaagttagatagtagaggttgcgtgtttgtatacgtagatatatatatatataaatatagatatttaagcgtatatagattatacgtatagagttatagataaggatatatatatatatatcgtggttttttacgtatatatatttttaaagagttttgggtaatttggtgaggtttttgagtgttgtttaagatgtgtgtgtgggtggggacgtagggacggagaaaggggagtgtgaagtaggatttttagtaggttaagtgtcgttgatttttttgttttcgattttaaatttttttttttttttttttagggaggtttgaattagaaattttaaatttgggtttgtttttatatttatagaggggaggagttttatttttcggtgttttttatttttataatttttaaagattgtaaacgagttttttttttttgtgttagattttgtcgcgttaaggcgtcgagttcgtttaaaattttaggtaatatttatttttaggtggggtttagattcgaggtcgttgcgggttcgggtttttggtttgtttgattcggggttagggaattggggaggggaaattcgcgggatagggggttgggggcgtggagtcgcgtgtagtgttttagacgcgcggtacggaggagcgggcgagggcgttttttggacgtcgtagttagttagttttttttttatttcgggtttcgtaggaatgtaatcgaggatgttggttttgcggttgtttaacgtggtggttttcgtttattttttgtgtatttttttggtgattttcgtgttgtagttttttttttttttgtttagtatgcgcgaggatttcgcggtcgttcggtttttttcgttcgttttgttttacggggcgttttttttatttttttcggttaacgttttgggtaattagtttttgttatttagaatt

SEQ ID NO: 42 - DNA, 2804 bp, Artificial Sequence
  chemically treated genomic DNA (Homo sapiens)
ttaaggtttgttggatttgaggttgtttggggtgttaaatagatttatttatgagtatatttggttaatatatttaagtttaatagtgggtgggatttttggttggttttgattttttttatagtgtgtgtaaatgggtatttattagattttttttgtttgtttttttatttgtaaattttgaaaggagagtattttttggggtgattttgaaaattatgttagaattgaaaaggtttgtgtaaatgtgaggtgtaatgatgatttattagaagtagttagttttgtatgtgtttgtaggatagatgttagaatgttttataaatgtgtgtatatatatattatgtatgtgtgaaggtgtatatttgtttttagatatttgataaatgtatatatgtatgtgtgtatttttggttgagagtaaaggggttaatatagggtttatataggatattattttgtagttttgtgtgtgtatagtatatatgtgagtatgattgtttgtgtttggagatattgtatggtattggaggagttgtttagttgttggtgttatttgggaagtagggttttgggtgttgttttggagtgtgggaaagtttggatttgggtttgttggttagtgttttggtgttgttgggtttttttattttttatttgttggttggtgagtggttttagttttaagatttttgattttgttggtgaggggagggagtgagaaggagtgtgttttgggtttaagaggttgtagggttttattttttaggtttgttgttttttttttatttttttaggttatatttttatttaaaataaagaagggtgtttgatttatttaggttagggaagttggtttttgggagttttttgtttttataagttatggtgaagggaggtgaagttagggtttgttatggtttgggagaaaatgtggttgtagggtttttttgggttgtagtgttggtttggggttttaagattgttaaggtgtgtgtgggaggtgtgtagtgtggttattgaagagttttttattattgtattggtaggttgttgggtttgttttttttttatgtttttaagggttttgagttgtgtagtatttgtattatttagaagtgtttgtggagaaaatgattttaggtgtaagtttaaggttgttgtttgtaaaggtaatgttgtggagattgggttttatagtgatttgggtttttaagttattgaaagttatagggtagggttataaatatttttttgttttttttgtagaattgtgtggttgataggagagtgttgtgtagaaaatttgaggttgggtgttggaggagtttttgtggtttggagaaggtatagaggtgtttttgagaggtgtagttggaataggtgatgtatgggtttggatttggttggttaattgagtttagtggttgtgaaaattagagttgttatagaggttgagtatgattttatttttggggattgggtttggtggggagttattgtttttaatgtttttagagattttaagtaggataatataatgttggtaggagtaaggtgtaaggaatttagtggtagaagttttttgggggggtggggaaaggtagatttgtgttttgtttgagtttgggggtggggatagtttttggttttgtagtttttgttttggggattagttgggtttatttaatttttttatatggggttgaaaggggttaatgggatggttttgttgttttttttttgggattttatagggttttgatttggtttttatttttgtatggttagtagttgtgggggttttaggaaggaggataaaggtttggtgttattgtgggtgggggtttggttttttggttttttgtttatatttatagtttttagtggttgttgggggaagatttttaaaaatatgtgttgaatttttttttttttttttttagaaataaataaataaaaaaggtaaaaggtgaatttttttttattttttgtttatagagattaaagttttttgggattttgttttttttttttttttgattgtttagaaatatttgtttttttttgtatatagaggaaaatgtggggaaaggttttttaaaatttggttttatattattattattattaaggataattgggtaggttgaggttttaatgtggatgatttgagttggttttgtgttggggttttgtagttattgttttgtgtgtttagtatttttgggggtgattagggtttttgtgtttttgtttgttgtttggtagttgagagtattttgtgtttagattggttgatttatttttttttgaattttgtttagagttggtaagggggatttagtttgtgttttaagatttgggtttgtagtgttgttaataggtttggggatatgaggtgttttaggttggggtttttttggttgttggttttttttgttttttatttgttggtggtgttttggttgtttgtaattgatttaatttgttttttgtgtttgttttttaggttttttgtttttttataaaggtttaggggagttttgtttataggttgattttgtaatttttggtttggtggttattttttgtttttttgaaaaagaaaaggaaaaaaaaaaaaaaaaagaaaaaattaattagttgagggaggtgtgtgaggattggaggtgttagttggatagtttatgagtaggtttttgggttggtgttgttttgtgggttagtatggttttttttagagaaaattttttaaatgtgtgaagattgttttgggggaagtgagagggaggttggaggag

SEQ ID NO: 43 - DNA, 2804 bp, Artificial Sequence
  chemically treated genomic DNA (Homo sapiens)
tttttttaattttttttttgttttttttaaagtggtttttatatgtttaggaggttttttttgagaaaggttgtgttgatttgtgaagtggtattgatttagggatttatttataggttgtttggttggtgtttttagtttttatgtgttttttttgattggttgatttttttttttttttttttttttttttttttttttttagaaaagtagaaggtagttattgggttagaggttgtagggttagtttgtgggtgaggtttttttaggtttttgtggagaaatgggaaatttgaggggtaaatgtaggaagtgggttgggttaattgtgggtgattgaggtgttgttagtgggtggggagtgagaggggttagtagttgggaagattttggtttggagtgttttgtgtttttgggtttgttggtggtgttgtaagtttaggttttggggtgtgagttaagttttttttgttagttttaaataaaatttgggggagaatgagttggttagtttgggtatagggtgtttttgattgttgggtggtgggtggaagtgtaggggttttgattgtttttagaggtgttgagtgtatagggtagtggttgtagagttttggtgtgaggttaatttggattatttatgttgggattttagtttgtttggttgtttttagtaataataatagtatgaaattgagttttaaaaaatttttttttgtatttttttttatgtataagggagaataagtatttttaggtagttaaagaaaaaaaaagggtaggattttaggaaattttaatttttatggatgaggagtgaaggggaatttgttttttgttttttttgtttgtttgtttttagaagagaaaaaaaggaaatttgatatatatttttaaaaatttttttttaataattgttaaaggttgtgagtgtgagtagagagttaggaaattgagtttttgtttgtggtgatattgggtttttgtttttttttttgaagtttttgtgattgttgattgtgtagagataaaggttgggttagggttttgtggaattttgagggaggggtggtggggttgttttattggttttttttaattttatgtaggggggttaggtgggtttagttgatttttggaataggggttataaggttaggggttgtttttatttttaggtttagatgaggtatggatttgtttttttttatttttttgaaaggtttttgttgttaaattttttgtattttgtttttattagtattatattgttttatttaaagtttttggaggtgttagggatagtggttttttattggatttgatttttagaaatggaattgtgtttaatttttgtggtgattttggtttttgtgattgttgggtttggttggttggttagatttgaatttgtgtattgtttgttttagttgtgttttttaggggtgtttttgtgttttttttgggttgtggagatttttttagtgtttggttttgaattttttgtgtaatgtttttttgttagttgtatggttttgtagagaaggtgggagagtgtttgtgattttgttttgtagtttttggtgatttaaaaatttaggttgttgtggaatttagtttttatggtattgtttttgtaggtagtagttttgggtttatatttgaggttgttttttttatagatatttttgggtgatgtgagtgttgtgtagtttagaatttttggaagtatgagaggaggatgagtttggtggtttgttggtgtggtgatggagggttttttggtagttatattgtgtgttttttatatatattttaatagttttggggttttgggttagtgttgtagtttaaagagattttgtagttgtatttttttttaggttgtggtaaattttggttttgtttttttttattatggtttgtgagggtaggaggtttttgggggttgatttttttgatttgaatgagttaggtatttttttttattttaagtgggggtgtgatttgaggagataaaggaaggatgatagatttggggagtggggttttgtagttttttgggtttggagtgtatttttttttgttttttttttttattggtaggattgggggttttgaaattggagttgtttattggttggtggatgagagataaaggagtttggtggtgttgaagtgttgattagtagatttggatttggatttttttgtgttttagagtagtatttgaaattttattttttaggtggtattgatggttgagtagtttttttggtgttatatggtgtttttaggtatagatagttgtgtttgtgtgtgtattgtgtatgtataagattgtaggatgatgttttgtatgagttttgtattagtttttttgtttttagttagaggtatatgtatatgtgtgtgtatttgttaagtgtttagggataggtgtgtatttttatatatatgtgatgtgtatgtgtatatatttgtagaatgttttagtatttattttataggtatgtatagggttggttgtttttaataagttattattatattttgtatttatataggtttttttagttttggtatgatttttagaattattttgggaaatattttttttttaaagtttatagatgaggaaataagtaaaaagaatttaatgggtatttgtttgtatatattgtgagagagattgaggttagttaaagattttgtttattgttgaatttgggtgtgttggttgaatgtgtttatagatgggtttgtttagtgttttaggtgattttaggtttggtgggttttgg

SEQ ID NO: 44 - DNA, 3952 bp, Artificial Sequence
  chemically treated genomic DNA (Homo sapiens)
ggttgtagttggagaggaataggaattgtagtggggatgttttggtttttgggtttatagtatttgggatggatgtgtagtagtgtgggttgggaattgggtattagggtgggatgggtgagaggttttaagggataaggtagggagaagtgtagtggggtgtggggaattgtatgttttttttttgtttttgttttttattttgaggtggtagggtgggtgggtgtggttttgggggtgggtgggttgggtggggtggaggtggggttgtagtattggttttatttagttttttttgtttgtagttagagtgagttgagttgtggttagttttggtgggtagggggggtgttggagtgtagtgtagtgtagttttattagtttgtaaagtggattgagttggaagttgagtgttgttgtgggaggtgggtgatgggggtaggtgttattggttgtgttatggatgggttgtgtttgttgttgttgttgtttttgggggtgagtgttagttggagggggtttgtttttttttttgggattagaattttgagaagagttgggtgttgttattaaggaaatagaatagagtattggggttttagatattgagggtgggtggtgggaaaggatttttgatgttgggattatgaaggagggtttagggtttttggagtgtagaggtgattttttagggtggagatgagggtaagattggagtatggatgttggtttttaggtattgtagggggtggtgggggagttgggaggggttttttaagagggggtatggggttttttgatgtttaggttttttggaagaggatatttgaatgttgggattttgaagggattttttttttagtattttggtttttggagagttgtgggatagaattaaggtgagagaaggagggggaattggatggggattagagatgagaggggtgagttgggttggggtggggagtttgggatgatgggatggaataatggaggaggttggagggattggaggtagaggggatttggtaaggataatggggattggttagataatgggggggaggggtgttggagggagaggttggggagtgggagagaggttgagaagtgggttagggagggtagaagaggggtgatggtgagggtggtagagagatggaagtagaaggaaaggagatagagtggggtgtggattttgaagtggttggggttttgtttgtttgttgagggatagtgagatgagaagagagagtagaggtttggatatttttagtgtttgtttttgtgtttttgtttgtggttttttttagttttggaattggggttgtggatttaaggttgggaggggagtgtttattttgttggggtgaatttgtttttggggtttttttatggttggtgggtttttttgatgtgtgtgtttttatggtttgaagtagtgtagtggattgtgagggatggagtgggtgtgtttttatttgggttggtggtggttatgttttggggtgtagagtgttggggtgtattaggtggggattttttttggttgtgtgtagttttggttatgtaggtgggaggtggtaggtagggggtgttgtggggtgaggtaagtgtagtttgttgttgtttgtttgtgagtttggggttgtgtgttgttttttatttagttgtgtgatttgagtgttgtgtttattgtgttttgtgggtttttgtgttttgaagggttgggatttggtttgagttttttttggtttttggtgtaagttgttgggtatttaatgagatgggggtgtttggatgttttggattttgtagtgtggtattttgggttattgatttggtaaaggttggtgggttttttgggtggtttgatgagattgttagatgtggtttgttttatggttatgaattgaatgttttggaaggtttggtaatggaggaggtgtttttattttttttgttagtattttttattagagtattgtgttttaaattttggttttatagatatggagattgaggttttgagagtttaaatgatttggttaagattttatagtaagttgggttagagttgtggttagattttttgatttgatttttagtttggtatttttttatttttttagggggtagttgttgttttagtttggggttatggttgtgttttttagtagggtggggggggttgatattgtttttagagtttgttggtggtagagtttgtgggtgaggtgggtagagattttgtttgggtgtgggttttagtttgaaagtttagttttagttttttggagttgttaggatttgtggttgtgtttggggatttgggagtgattgtgggtatgtttgttgattaatgttgttggttagagatgttgtttagatgtgggtgggtgagtgtagattaggagagtggggaggagggattggattttagaggggtaatgatttgggttttgggtttgggtaagagtgagggtttttgtgtgaagatttaaggaaggaggggagttgggtgtggaggatttgggtgtttgggaaggtgtattttgataggaatttgttgtttgtagtttttgtggtttttgtttttgttttggtgtgtggttgtttggtttgggatggttgtgtgtggtttgagtttttttttgggttgtggtgagagagagagggttgaaattagagtgtgttttggtgggttggttggtgggttgtgttggtaatggaggtattttgttatttagatgtttgtaattagagttgttgggttggttaatgtgtttaatagggatggaatgagggtagtaaatgggtgtgtgtgagtggttgggttgagttgggtggatggtggatggggaggtagttttgtgggggatgggtttttattgtattgttttagtttagtttggtttaagtgttttgttttttttttgggggattgtgtggggaggtgggaataattgatgtgttgagtttttattaagtgttttgtatttttttggtagttttttttgaattatttaatttttataaggttttagtaaggtgaatttagttatttttattttgtagttgaggaaatagaattttttagatttttaggtttgagattaggtttttttagtgagttagtggtggtgtttttgttggaatttaggatgtttggtttgggatgtttttttttttatatatgttaggtttttttttgttttttattttttagattatggaaggagttgtggttttgagagattaaattgtgttttatgtttttggttttatatatttagatttgagttttttttttatatgtagaggttttgtttttttttaagtttttatgttatattattttgggtaattagtttttttttttttaattttttttttatttaaagggagtgaggggtatgtgttagtgttttttttgggtttgtattgattttaaaaggttttttaggtgtttgaaaattttttttattttatggtggtgattatggttttatttatttaagagttttttgttgaagttgttggaatggttagggttgattatattgaaatatttgtatggttttaaatatttttaattgttttgttgttttttttttttttttaattaaaaaaaatgaaaatttttaaaagttaatttatttaaggatttttttattttagttttttgtaagttttgaaatggttaaaataaaaagattataagtgtttttaaaaatgagatgaaattattttgttaaatgtgaaatgattaagtgtaatatatataaattttagggaaatttatttgttatttttataaattaatttttttggatttgattttggagtaattagtttgaatgttagttatttttttttatttggttaaattttttttttttgtttggggtttttttaagatgagatgtttttttgataattaatatttatt

SEQ ID NO: 45 - DNA, 3952 bp, Artificial Sequence
  chemically treated genomic DNA (Homo sapiens)
aataaatgttagttattaaagaagtattttattttaaggagattttaggtaggaggggagagtttagttaagtagggaggggtgattaatatttaggttaattgttttaaaattagatttaaaaggattaatttatagggatgatagataaatttttttgaaatttgtatgtgttatatttagttattttatatttgatagaatgattttattttatttttaagaatgtttgtaatttttttgttttggttattttaaggtttataaggaattaaggtggaaggatttttagatgaattgatttttaagaatttttattttttttaattagagaaaagagagaaatagtgaaatagttgaaagtatttgaaattatatgaatgttttagtataattagttttggttattttaatagttttagtaaagagtttttaagtgaatggggttgtggttattgttatgggatgggagagatttttaaatatttggagggttttttgaggttgatgtaaatttaggggaggtattggtatatattttttattttttttggataggggaggagttgggaggaaaggagttaattatttaagataatgtagtatagagatttgagagggggtagggtttttgtgtgtggagaaggggtttagatttaaatgtgtggggttaaaggtatagggtatgatttaattttttagagttatgattttttttatgatttagaaggtagggggtgggagggagtttggtatatgtaggaaagagaatattttaggttaagtattttgggttttaataaagatgttattattgatttattgggggagtttggttttgggtttgaaagtttagaaggttttgtttttttaattgtgaagtgggaataattaaatttattttgttaggattttataaggattaaataatttaagagaaattattagggaagtgtaaggtatttagtaggaatttagtatattgattatttttgtttttttatgtggttttttagggaagaagtgaggtgtttgagttagattgggttggaatagtgtggtaggggtttgttttttgtggagttgtttttttatttattatttatttagtttagtttggttgtttatgtatgtttatttgttgtttttgttttatttttattaggtgtattagttagtttggtggttttggttatagatgtttgaatgataaagtgtttttattattggtgtggtttgttagttgatttgttgggatgtgttttggttttagtttttttttttttattgtggtttaggaagaaatttggattgtgtatagttattttagattgagtagttgtgtgttgaggtggaggtgggagttgtaggggttgtagatggtaggtttttgttggggtatatttttttaagtgtttaggttttttatgtttagtttttttttttttttgggtttttgtgtggggatttttgtttttgtttagatttggagtttaagttgttgtttttttgggatttggttttttttttttgtttttttggtttatgtttgtttatttgtgtttgagtagtgtttttaattagtggtgttagttagtagatgtgtttgtggttgtttttaaatttttggatgtagttataggttttgatagttttagggaattggggttgagtttttgggttggggtttgtatttggatagaatttttgtttattttatttgtaggttttattgttgatggattttggggatagtgttaattttttttgttttgttgggaaatgtagttgtgattttgagttgggatagtggttgttttttgaaaaggtgggggagtattgagttgggaattaggttggggagtttagttatgattttggtttaatttgttgtgagattttggttaagttgtttaaatttttagagttttagtttttgtatttgtaaagttggaatttggggtgtagtgttttgatgaaagatgttggtggggagagtgaagatgttttttttgttgttagattttttagggtatttggtttatggttataaagtaggttatatttgataattttgttggattatttggaggatttgttgatttttgttgagttggtggtttgggatattgtgttatagaatttgaggtgtttgggtgtttttgttttgttaggtgtttagtggtttgtattgagagttaggagaggtttagattggattttgattttttgaggtgtgggagtttatggagtgtggtgggtgtggtgtttgggttgtgtagttaggtggggagtggtgtgtagttttagatttgtaggtaggtagtggtggattgtatttgttttgttttgtagtgttttttgtttgttgttttttgtttgtgtagttagagttgtgtgtggttaggaagggtttttgtttagtgtgttttggtgttttgtattttgagatgtagttattgttagtttgggtaggggtatatttgttttgttttttgtgatttgttgtgttgttttaagttgtgagaatatgtgtgttggaggagtttgttggttgtgggggaattttgggagtgggtttgttttggtgaagtgggtattttttttttagttttagatttgtagttttaattttgggattgggagaggttgtgagtaggagtgtggggataggtgttggaaatgtttaagtttttgttttttttttttgttttattgttttttagtgggtaggtgggattttgattattttagggtttgtgttttgttttgttttttttttttttgtttttatttttttgttgtttttgttgttgttttttttttgttttttttaatttattttttaattttttttttgttttttaatttttttttttgatgttttttttttttattgtttggttggtttttattgtttttgttgggttttttttgtttttagtttttttgattttttttattgttttattttgttgttttgggttttttgttttagtttagtttgttttttttatttttagtttttgtttagtttttttttttttttttgttttggttttgttttatgattttttagagattgagatgttgaggggaaagtttttttgggattttggtatttgagtgtttttttttgaagaatttgggtattggagagttttatgtttttttttgaaagattttttttagtttttttattgttttttgtggtatttgaggattggtatttgtgttttggttttgtttttatttttattttggagagttgtttttgtgttttgggaattttagatttttttttgtggttttggtattagaggtttttttttattatttatttttagtatttgggattttaatgttttgttttgtttttttggtggtggtgtttggttttttttggagttttgattttgggaaagggagtgggttttttttggttaatatttatttttagaagtagtaatagtagtaggtgtggtttgtttatggtgtggttggtggtatttgtttttattgtttgttttttgtggtagtgtttgatttttagtttggtttgttttgtggattgatggggttgtgttgtgttgtgttttagtgttttttttgtttgttggagttggttgtggtttggtttgttttggttgtgggtgggagaggttgggtgaagttagtgttgtggttttgtttttgttttgtttagtttgtttatttttggaattgtgtttgtttgttttgttgttttggggtgggaagtagaggtaaagggagggtgtgtggttttttgtattttgttgtgtttttttttgttttgttttttagagttttttatttattttgttttggtatttagtttttggtttgtgttattgtgtgtttgttttggatgttgtgggtttggggattagggtgtttttattgtggtttttgtttttttttggttgtggtt

SEQ ID NO: 46 - DNA, 2820 bp, Artificial Sequence
  chemically treated genomic DNA (Homo sapiens)
tttaggggataatatttaggtatgttaatggagtttaaaatgttaaggaaattatattataattttgtttagtatattataggttgttaaattgaaatgttatgttagttaggagtgtagtaatttttattttttggttttatttaattaggaagttttagtagagtgaagtttgttaagtgtttgttgttagaatttgaaggaatttgagtgagtaagaagagtgtttgatttattttatagaagtttgtttagaaatggaggagttagtgtttattgaagttggttttgtttttggtttgtttatatggagtttgattagttttagttatgtttattttggtttgggagatttgtaaagtgtttttttttttaatttttttgtattattttgaagtttagggaagtaaagagaggggtatatttggattgtaaaattaatgttttttgttgtttaggagagaagggaatgagagagagagagagatagatagatagagagagagagagagagagagagagagagagagagagagagagagaaattttattgaaatttagtttttttagaatttgtgtgatttggtttttaatgggagattagtgtgattttatggtatttttgttaggaattagtgatttttttgtagttattatttgatttattgtttttttgtttatttttttttataaagttattttttttttattttagtaagatttttttttttaatgatgataaagtttttgttttagtgttttttttaggattggtgtttttttaaaatagtgaatttagaaaattattttgtttaatattttttaaaatttttgtagttttaatgtaagtgtaagtatgtaaaggttttttgttatatttgtattttttgtttattttagaattattttttatttttgggtttgtaatagttttttttgtttttttggatagaggtgggtggtattaggggtttagggtagtaggaggtgaggggttgaggaggttgttagggtaggttggtttgtgttggatatgtgtgtttttttgtggagttaaagggttggggatgggggttttggatttattagagtaattttagttggtgggtgtttggtagttatttaaggaggtagggaaagtagtgagttttattgggtgggttatgatgagtagtatgatgggtagtagtagtagttagtaaaagtttttgtaaagtgtttagttgttgtattgttgtggggatttttatagtattatgattagtttgtgtaattttgtagtagtaaatggtttttgaggaatataggattgtgggggttgggtagtgggttattgagtattttgtggatggtggtagtagaggtggtggtggtggtagtggtatttggtggggaagtagtagttaaatttgtgtatgattttgagagttttagtaatatttagggattgggtttagttttggagtgagagggttgtttgttgagaagttgtgttggagatgtgggaagttgttgttataaggagggagttttgggaagttggaggataggaggagatgggagtttaggggtagatgagtggagtttgaggaggtagggtggagggagagttaaggtgttttgtagtttggtagttgttttttgagttttgttgtttgtatttttttggtgtttgggaagtagtaggtttttagtttgtttggggttatgtgggaagaggtagttgggttttgattggtggagtaggatgtaggttttgggagggaggggttgatgaggaggtgtaaggatgtaaggaggaggtggttgtggaagttatagatgggtttgtttgttaggtgttggtttgagtggggttaggtggggatggtttaaatgagaagtttgggttttagggtgggttatttgtatatttatatattatttgttttattttttgttttaggatgttttttattgaaggtggggtttggattagtgttttttttttgtgtgtgattttgggttgtgagtgtgggttgtggttgggtggtgtttttttgagttggagatggtgggggtggaggtgttagaggagtagtagtagtagggtagagaggggtgagttggtgtgggagagggtgttttgttggtgattggtgttttagtgtgtgggagtgtgttgtttaggttgtagggggatgtaggttgggaatgttgtggtggagaggttagggatgtttttttagggatttataggaaagagggtgagaggtgatggtgttagaattgtttttgttgatttggaagtaatagtagtattttttataagagtgtgtaattttaaggttgtttgttgaggtagtttagttattttggtaggtgttttttttttttttttttttttttttttttttttttaggttttttgtagttttgatttagtttaagtgtttgtaggtttgaatttttttttttattatttgtttttttttagtttgtagtttattagtgtgtttatttgggaggtgtggttagatgtgtttggaaggttagattggttgggataagtggtttgagagaaagagaaaggtttttttgtatatgttgtgggtgggttgttgggagtattggttgggtagtggtgtttgggaaggggagagtgggttttatttgttggtttaggtagtgattttgtgttttttatttgggtttttgttggatggttggtgatttggggtgatgagagaaggtttaatttggtaggagtttttggttttgtgtgttttttttattttttttagtgggaagggtaaatggtatagtgggatttgttttttg

SEQ ID NO: 47 - DNA, 2820 bp, Artificial Sequence
  chemically treated genomic DNA (Homo sapiens)
tggaaggtgggttttgttatgttgtttgttttttttgttggagagaatgaaagaaatgtgtagagttagagatttttgttgagttagatttttttttgttgttttaggttattggttatttggtaaagatttgagtaaggaatgtagggttattgtttgggttaataaatggagtttgtttttttttttttggatgttgttgtttggttgatgtttttggtaatttatttgtggtgtatgtagaggagttttttttttttttttagattatttgttttgattaatttgattttttaaatatatttgattgtattttttaggtggatatattaataggttatgggttggagaggagtgggtgatgaggagagggatttaaatttgtgaatgtttgggttgggttggagttgtggggggtttgggaggagagaggggagaagagagaaggaaggagagtgtttgttgggatggttgagttgttttggtgagtagttttggggttgtatgtttttgtgggagatgttgttgttgtttttaggttggtaagagtggttttaatattattgttttttatttttttttttgtaaatttttagagaaatgtttttggtttttttgttgtgatatttttagtttgtatttttttatagtttaggtggtgtgtttttgtatgttggagtgttggttgttagtaggatgtttttttttgtgttgatttgtttttttttgttttgttgttgttgtttttttgatatttttgtttttattatttttagtttggagagatgttatttagttgtggtttgtatttgtggtttggggttatgtgtggaagaggggtgttagtttggattttgtttttggtagggggtgttttggagtggagagtgaggtgaatggtatatgagtgtgtgggtagtttattttgaagtttgagttttttatttgagttatttttgtttagttttatttgggttagtgtttggtgagtgagtttatttgtggtttttgtggttgttttttttttgtatttttgtatttttttgttgattttttttttttgggatttgtattttgttttattaattagagtttgattgtttttttttatgtgattttgggtgggttgaggatttgttgttttttaaatgttagagggatgtgggtggtagagtttgagaggtggttgttgggttgtggggtgttttgattttttttttattttgtttttttgggttttatttgtttgtttttggatttttgtttttttttgttttttggttttttagagttttttttttatggtagtagttttttgtgtttttggtgtagttttttagtggatgatttttttgttttggggttgagtttagtttttggatgttgttgaaatttttgagattatgtgtgggtttggttgttgtttttttgttgggtgttattgttattgttgttgtttttgttgttgttgtttgtgggatgtttagtagtttgttgtttggtttttgtgattttgtgttttttggaagttgtttgttgttgtagagttgtatgaattagttatggtgttgtgggagtttttgtggtagtgtagtagttggatattttgtgagggtttttgttggttgttgttgttgtttgttatgttatttattgtagtttgtttggtgaagtttgttgttttttttatttttttaagtgattgttaaatgtttattggttggaattgttttggtaagtttagaatttttgtttttgattttttaattttgtagaagaatatgtgtatttagtatagattagtttattttagtggtttttttagttttttattttttattgttttagatttttaatattatttatttttatttagagaaataaggggaattgttgtaggtttgggggtgaggggtggttttgggatgggtagaaagtgtaggtgtagtaggaaatttttgtatgtttgtgtttatattggagttgtgaggattttgagaaatattaaatgggatggttttttgggtttattgttttgaaagagtattaattttaggggaaatattgaaatagaagttttgttattattaaagaaaaaagttttattaggatgaggaagaaataattttatgagaaagaatgagtgagaaagtaataaattaaatggtgattgtaggggaattgttgatttttggtaaaggtgttatgaggttgtattggttttttgttgaagattaggttatatagattttagaggagttgggttttaatagaatttttttttttttttttttttttttttttttttttttttttttttttttatttatttattttttttttttttttattttttttttttttaggtggtaaaagatattggttttgtagtttagatatgtttttttttttgtttttttaagttttaaggtagtataggggagttgagaaaaagaatattttgtgggttttttaggttggagtgggtatgattgaggttggttaggttttatgtaggtgagttgagggtggaattgattttagtgggtgttgatttttttatttttggataggtttttgtggagtgggttaggtattttttttgtttgtttgggtttttttagattttgatggtgaatgtttggtaggttttgttttgttgaagttttttaattaaatagggttagaggatgggagttgttgtatttttagttggtatagtattttggtttgatagtttgtagtatattgggtagaattgtggtgtaatttttttggtattttaaattttgttaatatgtttgggtattgttttttagg

SEQ ID NO: 48 - DNA, 3104 bp, Artificial Sequence
  chemically treated genomic DNA (Homo sapiens)
gtgggtgttgttgagtatggggaggtgttgaaatagttttggtgtgttgatttaagttttgattggtagagttatttggtgattgatagggggtttttatggtgtttgtgttgttaatttgtttattttaatagtggagttagtttgtttgttggtgtgtttgagttgagttgagtttgaattttaagttgtggagttagtattttttttagttggggttgtttgtttttggttgttgagttattgttgttatttggtagtgtgttttgttgttttaatttgttttattaataagtgtttggtatatttagttaggtttgtgggtatttgttgtgtgttttgttttgggtttagtgtttttgttgttgttggtattgttttgatgttttagttgtttattttgaattttagtttttagtaagtggttggggtatgtgagattttggaagagagtggtgatgtggagtgtttgggttgttttttttggttgttgtttgtggtttttgtggtttgtgaggtttttaataagaatgagttggtgttatgtgtatgagttattgtggttttttatggtggtaattattgtgagttttattatattttggaaaattataagtttattaaggagttgtatgttaagttgtaggtgttgtggtttgaagtatattattaggaggttgagaagttgtgtggaagatttttgggatttgtggataagtattgagtaaggaagaagtttttgttgttgtgtattatttgggatggtgaatagaagatatattgttttaaggagtgtatgtggtatttgttatgtgagtggtatttgtaggatttatattttaattttagtaaaaaatgtgagtttgtttaggtaattggattgatttttatgtaggtgggtaattggtttaaaaattgttgataaagggattgagtggttgtagttaagaataggttggtatttagaggtttttgtgttttgagtgtattggggaggaggtgggtggaggtatttttggtgtttttatttagtttttggtgattttaatttagtaggagttgggagtgtggtttgttttgggttaagagttttgtgttttgggtttttggttgggagtttttttgttggttttgtttttttatttgttggttttttatgtttgtgggtagttgtagtagttggttttggttattaaattaaggttttattgggatggagaggggaagagaaataaaaaattaaaattttataaatagttagggattttaagatttaaagttaatttttgttagtttgggtataggtttttattattaattgaagtttggtttattagtaatgtgttggttttatgttaattattatttttaaagtttaggtatatttttttttaatgttttgaaaatagtttttaatggatttttgagaaatgggaagttgagtttttttttttttatgtgttgtttgttatttttgttttaaaatagtaaattagtttgtgggttgaggttttttgttttttggagtgtggattttgattagttaaatattttgtggaagagtttggttttattttttaggtttaaatgttttttataattttttttgtttttaggttgggttgatttgatttaatgtgattgtgggagtatttgtttaggtgtaagttttaggtagatgtattgttagaaatggtattttatgtttttgggattgatttgtttttgttatttatattttgtttattttttgatagttttgtaaattttttaaaagtgtataataaatagggaggatattgtaagtttagtatataaaagatttgggagttgtggtgttgagaaagggtgtgaattatggtggggtataatagtagggatttgtggaggggtggttgtggatttttgtttgatttttgttgttttgttgagtaatttttgttttaattgttggggtttttggaagaatttttagttgttgggttggagggatgtaggaggtggtgggggtgggtgatgggtggttgtgttatgagttgtgatttgtgtttttttttttttttgtagattttagtagtaggttttgttatagggttttgggtgggtattatgggtggagggtgatggtatgttagaggtgttgggtgttgttattagtttggttgttagtttatttagtaaggtggttattttagttatttttattatgtttagtgatagtgagtgtgatatttgagttgtttatttaggatgtttagaagtagattttagtgtaaaaatgagaaaaataaaatgaaagaggggaagaagatgagagatttgtaaatttagtgttatagaagttaggtgattagggatttgtgggtttgggttgttgttttttgttttattttgtggttggtttggttttattggtgttttttggttgtgattatgggaattagtgtgaggtttgatttagtattatgttttttttgttttgtttttttttaaggattttgttgtaaagtttttttggaatttgaattgtaagttgagtgtttgtttagatttttttatgggtattttatgttgaaaggatgttgttatatatgtataatttttgttttaaagtttttttttaataaaatatatatatgttgtttatttatttatttaagagattgttatggtaggtttttttgtagtttggggaatttgttgtttttaaatatgtaggttggtggtgatgggttttgtgtggagaagttaaataataaaataatttagtgggtaatttttttaattaagggagttgtttttagattttttttttttttattattattaatattattttttttattaggtatgtagggatttttgagtaaatggtttttggaaggttttatttatatattttttgttttttttggtgttttttggtatatgttttaaataatttatggtaggtttataattattttttatgttaaattatatgtatgtgtatatatgtatgtatttatataaatatatgtatgtatttatataaatatatgtatgtatgtatatatgtgatatatttaaggttagaaattggtaatatgtgagtgtttttttta

SEQ ID NO: 49 - DNA, 3104 bp, Artificial Sequence
  chemically treated genomic DNA (Homo sapiens)
tagagaggatgtttatatgttgttaatttttagttttaaatatattatgtgtatgtatatatatatatgtttgtataggtatatatatatgtttgtataggtatatatatatatgtatatatgtgtaatttgatgtgggaggtggttatagatttattataggttgtttaaaatatatattaggaagtattaaagaaggtaaaagatatataggtaagattttttggagattatttgtttaagggtttttgtatgtttggtgaagggaatgatattaataataataagaagaaaaggaatttgagagtagtttttttaattaagaaggttgtttattaggttgttttattgtttggtttttttatatagaatttattattattagtttgtatgtttagaaatagtaagttttttaagttatagagaaatttattatggtggttttttaaataagtaaataaatagtatatatatgttttgttaaaaaaaaattttaaagtgaaagttatatatatgtaatagtgtttttttgatgtgaaatatttatgggagaatttgggtaggtgtttagtttgtagtttgggttttgaagagattttgtagtaaaatttttaggaaaaagtaaagtaagaagaatgtggtgttgggttaggttttatgttggtttttgtggttgtggttaaagggtgttagtgaagttaggttggttgtggggtggggtgggaaatggtaatttgagtttgtgggtttttggttatttggtttttgtggtgttggatttgtaggttttttatttttttttttttttttattttgttttttttgtttttatattggaatttgtttttgagtattttggatgggtaatttagatgttgtatttgttgttgttggatgtgatggagatggttgaagtggttgttttgttggatagattggtggttgggttggtggtgatgtttagtatttttggtgtgttgttgttttttgtttgtagtgtttgtttggaattttgtgataggatttgttgttggagtttatggggaagaaagggaatatgggttatagtttgtaatatagttgtttgttgtttgtttttattattttttgtgtttttttagtttggtggttagaggtttttttgaagattttagtagttaaggtgaggattatttggtaaggtgatagaggttgggtaggagtttgtggttgtttttttgtgggtttttattgttgtgttttattatgatttgtgtttttttttagtgttgtagtttttaggttttttatatattgggtttgtagtgttttttttgtttgttgtgtatttttgggagatttataggattgttaggaaataaatgaagtgtgggtgataaggatagattggttttagggatatgggatattatttttaatggtgtgtttgtttggggtttatgtttgagtaagtgtttttgtgattgtgttggattgggttggtttgatttaaaggtaaaaaggattgtaaggagtatttgggtttgggggatgaggttgggtttttttgtaaaatgtttggttaattgagatttatattttgggaaatgaaaagttttggtttatggattagtttgttgttttgagataagagtggtaggtagtgtatgggaagaggaaaatttgattttttattttttaaaagtttattgaaaattgtttttaaagtattagggagggatatatttgggttttgaaaatgataattaatatgaaattgatatattgttaataagttaggttttgattaatagtaggagtttgtgtttaggttgataagaattagttttgggttttggggtttttaattgtttgtaggattttaattttttatttttttttttttttttgttttagtgaagttttggtttggtgattgggattagttgttgtagttgtttgtaggtgtggggagttagtgggtggggaagtagagttggtaagggaatttttggttaggagtttagaatgtagggtttttaatttaagatagattgtgtttttaatttttgttgaattggagttgttagggattgggtaagggtgttagaggtgtttttatttgttttttttttggtgtgtttaaagtgtggaggtttttaggtattgatttgtttttggttgtagttgtttggtttttttgttggtggtttttgaattagttgtttatttgtgtaggggttagtttggttgtttgggtgagtttatgttttttgttggggttagggtatggattttgtaggtattatttgtgtagtaggtgttgtgtgtgttttttgaagtagtgtgttttttgtttgttgttttaaatggtgtgtggtagtgggaattttttttttatttggtatttgtttataggttttaggggttttttatgtagttttttagttttttggtagtgtgttttaagttatagtgtttgtagtttggtgtgtgattttttggtgaatttgtggttttttaggatatgatagagtttgtggtagttgttattgtgaaaggttatgatggtttgtgtgtgtagtattgatttatttttgttgagggttttgtaggttgtaggggttatgggtagtgattagaggaagtgatttaggtgttttatattgttgtttttttttagggttttatatattttggttatttgttgggggttgaaatttaagatgggtagttggaatattgaggtagtgttggtggtggtgagggtattgagtttggagtgggatatgtagtagatgtttgtgggtttggttgagtgtgttaggtgtttgttgatgaggtggattggggtagtgggatatattattgggtggtggtggtggtttaatggttgggagtggatgattttgattggaggaggtgttggttttgtggtttggggtttgggtttggtttggtttaggtatgttggtaggtgagttggttttgttattggggtgggtggattggtggtgtgggtgttatggagattttttgttagttattgggtggttttgttaattaaagtttgaattagtatgttaggattattttagtatttttttgtgtttgatagtgtttgt

SEQ ID NO: 50 - DNA, 2378 bp, Artificial Sequence
  chemically treated genomic DNA (Homo sapiens)
attttgagattttagttgattttttttgttttgtaattagaggggattgtgatttgggttaattttttttttatgggttttagtggagttagttgtggaatggaatattaatttttattttataggtatgttgtgaggttttgttaagaaatagttataaaagggttttaagagttatgatgattgttttaattatttagtagggagggggtatttagtggtgttgtttttatgtattgatgttatgtggggtggggaggtggggtggagaatggagagtgtttttttattttttattttttttttttaagtttagtgtagggggaggtggttgtgattgattgaggggttagggaaggttggttaggggtgtgggtgtggttggggatggtttgggggtggggttgtgtaggaggttggaggagttttgtgggatttagaggtggggtgttggtttggggattattgtttttttggggtgtggttgtaggaggttggaggagttttgtgggatttagaggtggggtgttggttggggattgttgtttttttggggtgtggttgttgttgagtattttttagtttagttgagtttgtgtttaggttatgttttgttttagttgttgttttttttattttatggtgtttggagttattttttgtttgtttgttttttttttttgtttattttttgtatttgggtttgtattatttttgttaattgtttttttgattttgttgatattttttttttaaatttttgattggtatttttgtttggtatttttttttttatttttttttttttattttttttttttgattttttttgggtttttttttttttaaaatttgggtttttttgtgtggttttgtttttaggttggggatgttttttgtggttttgtgtttatggttttgatgttgtttttttttgtttataagttgtgttgtttttttgttatgttgggtttatggtggggtgttgagtggttggtggtgtttgggttagatgggggtggtggtatgggtttatggtgggttgtgggtggtttgggtttgtgaaagtgttgttgggggtaggtattgaggtgtaggatgttttggagtgtgtgttgttggagttgtagtaggttttgtttgtgttgaagtaggtgggtggtgtgtgggttgtgggtgttggtttggttgaggttttttaattggtggaggaggtttggttgttgtggttgtgggttgtgaggtagtttagggtttgtgtgatgttatttgttttgatggtggttttgatttgttgttgtggttgttgtaggtgttggagttggagatgtgtgtgtaggttgtgtgtttgttggagtagattttggtggttgagaattggtgagtgtgttaggttggggttgggagagtgttgtgtggtgtggatagttaagtgtttgtgtttttgtgtgttttgtgttgtgtttttgttttttttatttttttgattgtttgtattatatttttgttaggggttagtttgtttgttttatagataaggaaattgagttttgggaaagtttagtgatttgtttagtggattatagtgaattaagatttgtttttagggttagtggggtgaggaatggagttataggataggagtttgtttttggttttatggatggagatggtattttattgttaatttttttttttttttgttttttaagtttatagtttttttttttattggtttgggtttttgtttatgatatttttttttgttattattttattttttttttaatgagagaagaagggaaatataatgtttagaaaagagggagggagatttttttttttttttttttttaggttgtaaggtgtgttggtttgaggttgtttattttttttttgttgttttaatttaatttttgttttattttttattttggtttttgtaataggttagatatgattttattttgtagttgttgatgggaaatagttttttgttgggaggtatgggtgggggaagaggatattggggtgtagagtttggtggggattaggtagagtgtgtgttttttttttttattttatttagtattaagatgttgtaagagggttaaatagaggtttggttgttatttttgtatgttttttgggattttttttggagtatgaagatttttaaggatttatttttttttttttttgatgttagagtagattaagttgttatattttagttttatgttgaagtttttagttttttaagtttagaagagtttttggaagagttatttttagtttatgtagtttttataagtgtgaagggagtgggttgggggtgttttttttgttatttttgaaaagaaaaaaattatttggtg

SEQ ID NO: 51 - DNA, 2378 bp, Artificial Sequence
  chemically treated genomic DNA (Homo sapiens)
tattaggtaatttttttttttttgaaaatggtaaggaaaatatttttaatttattttttttatatttgtgagagttgtatgagttgaaagtgatttttttaaaaatttttttaagtttgagaagttggagattttagtatgagattggagtgtgatagtttggtttgttttggtattagaagggagggaaagtgagtttttggaggtttttatattttaggagagattttaagagatatgtaagagtggtaattaggtttttgtttgatttttttgtggtattttggtgttaagtggggtgaagggagagaatatatattttgtttggtttttgttgggttttgtattttggtgttttttttttttatttatgttttttagtagaaaattgttttttattagtagttgtagaatgagattatgtttggtttgttgtaagaattagaatgaaggatggagtagaagttggattggggtggtaagaagggagtaagtagttttaggttagtatgttttatagtttggggaggagggaaaggagaggttttttttttttttttttgagtgttgtgttttttttttttttttattgggagagggatgggatgatggtgagagaaggtgttatagatgggaatttaagttggtgggaaggagagttgtgggtttggggggtgggggagagggagaattggtaataggatgttatttttatttatagagttagggatggatttttgttttgtaattttattttttattttattagttttgggagtaaattttagtttattgtgatttattgagtaagttattaaatttttttaaggtttagtttttttatttgtgaaatagataggttgatttttaatagagatgtagtgtaggtagttagagaggtgagggaggtaaaggtatggtgtaaggtatatgggaatgtaggtgtttaattgtttatattatgtggtgtttttttaattttggtttggtgtgtttattggtttttagttattaggatttgttttagtaggtgtgtggtttgtatatgtgtttttaattttggtgtttgtagtagttgtaatagtaggttgaggttgttattgaggtggatggtgttgtatagattttgggttattttgtggtttatggttgtagtagttaggttttttttattagttggaagattttggttaggttggtgtttatggtttgtgtgttgtttgtttgttttagtgtggataaggtttgttgtagttttggtagtgtgtgttttagggtgttttgtattttggtgtttgtttttggtgatatttttgtgggtttgggttatttgtagtttattatgggtttgtgttattgtttttatttggtttaggtattgttagttgtttggtgttttgttgtgggtttgatatggtgaagaagtgatatagtttgtaggtggagagaagtagtgttaggattatgggtgtggggttgtgggggatatttttggtttggaggtggggttatgtggagagatttgggttttgggaaaagagggatttgagaggggttggggaaagaagatggagggggaggaatggagagaagggtattaggtaagggtgttggttagaagtttgggggaggagtgttggtaggattgggggagtggttggtaaaggtgatgtaggtttagatgtagggagtgggtgaaaggagagagtgagtaggtgagggatggttttggatgttgtagggtagaggaggtggtggttggaataaagtgtggtttgggtatgggtttggttgagttgggagatgtttggtagtagttatgttttggaggagtagtggtttttggttgatgttttgtttttgggttttgtggggtttttttagttttttgtagttatgttttggaggagtagtggtttttgggttgatgttttgtttttgggttttgtggggtttttttagttttttgtgtagttttatttttaagttgtttttagttatgtttatgtttttggttagttttttttagttttttagttagttgtagttatttttttttgtgttggatttggaggaagggggtggagaatgagaggatgttttttgttttttgttttgtttttttgttttatgtgatattggtatgtgggagtaatattgttggatgttttttttttattaaatggttaaaataattattataatttttaaggtttttttatggttgttttttagtgaaattttataatatgtttatggggtgggaattgatgttttattttatagttgattttattgaagtttatgaggaagaaattggtttaaattatagttttttttgattatagaatagaaaaagttagttaaaattttaggat

SEQ ID NO: 52 - DNA, 2436 bp, Artificial Sequence
  chemically treated genomic DNA (Homo sapiens)
agttttggatgataaggattaattgtttagggtgttggttgagaggaataggaagagtgttttgtggagtagggtgggtgagaagagttgggtggttgtggggtttttgtgtatgttgggtaggaagaggaagagttgtagtatgaaggttattagggagatgtataagaagtaggtgggggttattatgttgagtagttgtagggttagtatttttgattatatttttgtggggtttggggtgagaagaggattgattgattatggtgtttagggggtgtttttgtttgtttttttgtgttgtgtgtttggggtattgtatgtgattttatgtttttaattttttgttttgtggattttttttttttagttttttaattttggattaggtaggttagagatttgagtttgtagtggttttgggtttaggttttatttgggggtgagtgttgtttggggttttgagtgagtttggtgttttggtgtggtagagtttggtataggagggagggatttgtttgtagtttttaggagttgtgagggtggggggtattgggggataggattttttttttttgtggatgtggaaataagtttaggtttgggatttttggtttagatttttttaggaggagaaagggaaggatttggggttgggggtaggagaattagtggtatttgatttgttggaaattttgttttatatttttttttttttgtttttgtgtttttatttatatatatattttgggtagtatttagggattttattaggttatttaaggttttttggaggtatgtgtgtgtgagggattatgatgtgtgtgtgtgtgtttttgtttgtgattttgtatgtgtaatttgtgtgtgtttgagtatttgtatttgtgtatgtatatatttgtgtgtatagatatgtagtttttgttatttagttttaaaaaaattaattgaaataattgatatatttatatttgtttttgggtattgggtgaggtgggggtgtaattagaatatttgtgttagtgggttttggttagtatatttttttaatgttggttgtttgggttatttttttgtgaagagtgtttttatttgaggtgaaattaaaattttttttttgtgtttgttttttgtttttttgttgagagaaatttaaataatttttatggtgttgaaattttttttatgttgataagtttgttttgggtgtatgagtggatgtttggttagttttttttgggattgattttgttgttgtgtttagtttttattatgtttttattttattttatgttttatagttggggtttttggttagttttggaagttattgagaaataggattttgtgtgtttgagagaatttttttaggggttaaggaattggttagttggaggtgtgagaaaagttttgggaaggtggttgtatttaggatgggtggatgttatggggtttttgtttaggttgttttgtttgtatgggttgattggttattttggaattttttttgtaggttttagtgttttttgggaatttgtagtttttgtggagagtgtgggtttttttttattgttggggtgtagtgtagtgtatgtttgagggtggttgttgggggttgggtatgtttttagttttgtgttgttgggggttgtggtggtgttgtttattttagagagtttttggtttggggttttggtgaagtaagtgtttttttggtgttggttgttaggggggtgtgggagtagttagatgtgttgtagtgttgggaaggtggtgaaggataggggttaggggagtgaggggtgtttggtaggtagttttagttttggttttgtgtgggagaagggatagtagagattgtttgtggggttttggggtgtagggagttgtttgtttagttttggtgtttgttttgtttgtggtagagggtggtatagttggagttttggaaagattggtagtgttggtagttgtgggttttttggttattgttttttggatgtatgggaagttgttttttgtgttgttgttgttgtattgttgttgttgtagaggggtgaggaaattaatttattgagttttggttgttgataagaggagttttggatgttggtttttgttttgtttgaggttgtaaagttgtggatttggtttggttggtttgtagtttgtgttttgttttgggaattgggtaagtagtggggatgtggggaggagggagtgggtagttgttggttttttatttgggtgttagtgagtaagggttaggaagtggtggggatggtagttgggtattttttagttttgttatttttttttttgtttttgggggtggtgttttggttgttagttttagtattgtggatttgtttttttttttttttttgattttttttgagtgggttggggtgttttgtttggttttagtgtttg

SEQ ID NO: 53 - DNA, 2436 bp, Artificial Sequence
  chemically treated genomic DNA (Homo sapiens)
tgggtgttgaaattaggtagggtgttttagtttgtttaaggggaattgagaggggaggagggggtaagtttatgatgttgagattggtggttagagtattgtttttaggagtggagggaggggtggtggggttggggggtgtttagttgttatttttgttgttttttggtttttatttgttggtgtttaagtgggaagttagtagttgtttgtttttttttttttatatttttgttatttgtttagtttttgaagtgaagtgtaggttgtgagttagttgggttgagtttataattttgtagttttgggtagggtgagagttggtgtttggggttttttttgttggtgattagagtttggtgagttgatttttttatttttttgtgatggtggtagtgtggtggtggtggtgtggggggtggttttttgtgtgtttgggaggtagtggttgagaagtttgtggttgttggtgttgttggtttttttaaggttttggttgtgttgttttttgttgtgggtgaggtgggtgttagggttgaatggatagttttttatattttggggttttatgggtggtttttgttgtttttttttttgtgtagggttagggttgaggttgtttgttgagtgttttttatttttttagtttttgttttttgttgtttttttagtgttgtggtgtatttggttgtttttgtgtttttttggtgattggtgttgggaaggtatttgttttgttggagttttaggttgagggttttttggggtgggtagtattgttgtagtttttggtggtgtaggattgggggtgtgtttagtttttggtgattatttttaggtgtgtattgtgttgtgttttagtggtagggagaggtttatgttttttgtggaggttgtgggtttttggggggtgttgggatttgtaaaggggattttaaggtgattagttgatttgtgtggatgggatagtttggatggaggttttgtggtatttatttattttaggtgtaattgtttttttagaattttttttgtgtttttggttggttgattttttagtttttggaaaagtttttttgggtgtatggaattttattttttggtggtttttgaagttggttaggaattttggttgtgaggtgtggggtgggatggggatgtggtgagggttgagtatggtggtggggttgattttaggaaaggttggttaagtatttatttgtgtgtttagggtgggtttgttggtatggaaaggattttggtgttatgagggttgtttgggttttttttagtaggagggtgggaggtgggtgtgaaggggggattttaattttgttttaaatgaaaatgttttttgtaaagaaatagtttgggtagttagtgttggagagatgtgttggttaggatttgttgatataggtattttggttgtgtttttattttatttggtgtttgagagtgagtgtgagtgtattgattgttttaattgatttttttaaagttagatagtagaggttgtgtgtttgtatatgtagatatatatatatataaatatagatatttaagtgtatatagattatatgtatagagttatagataaggatatatatatatatattgtggttttttatgtatatatatttttaaagagttttgggtaatttggtgaggtttttgagtgttgtttaagatgtgtgtgtgggtggggatgtagggatggagaaaggggagtgtgaagtaggatttttagtaggttaagtgttgttgatttttttgtttttgattttaaatttttttttttttttttttagggaggtttgaattagaaattttaaatttgggtttgtttttatatttatagaggggaggagttttattttttggtgttttttatttttataatttttaaagattgtaaatgagttttttttttttgtgttagattttgttgtgttaaggtgttgagtttgtttaaaattttaggtaatatttatttttaggtggggtttagatttgaggttgttgtgggtttgggtttttggtttgtttgatttggggttagggaattggggaggggaaatttgtgggatagggggttgggggtgtggagttgtgtgtagtgttttagatgtgtggtatggaggagtgggtgagggtgttttttggatgttgtagttagttagttttttttttattttgggttttgtaggaatgtaattgaggatgttggttttgtggttgtttaatgtggtggtttttgtttattttttgtgtatttttttggtgatttttgtgttgtagttttttttttttttgtttagtatgtgtgaggattttgtggttgtttggttttttttgtttgttttgttttatggggtgttttttttattttttttggttaatgttttgggtaattagtttttgttatttagaatt

SEQ ID NO: 54 - DNA, 32 bp, Artificial Sequence
  chemically treated genomic DNA (Homo sapiens)
catcatatcaaaccccacaatcaacacacaac

SEQ ID NO: 55 - DNA, 25 bp, Artificial Sequence
  chemically treated genomic DNA (Homo sapiens)
gttcgaaatgattttatttagttgc

SEQ ID NO: 56 - DNA, 17 bp, Artificial Sequence
  chemically treated genomic DNA (Homo sapiens)
cgttgatcgcggggttc

SEQ ID NO: 57 - DNA, 17 bp, Artificial Sequence
  chemically treated genomic DNA (Homo sapiens)
ggggagggttgtttatt

SEQ ID NO: 58 - DNA, 17 bp, Artificial Sequence
  chemically treated genomic DNA (Homo sapiens)
cccctccctttaactct

SEQ ID NO: 59 - DNA, 31 bp, Artificial Sequence
  chemically treated genomic DNA (Homo sapiens)
ttaactctccccaacaactctcaaaccccac

SEQ ID NO: 60 - DNA, 24 bp, Artificial Sequence
  chemically treated genomic DNA (Homo sapiens)
ttagtcggaggtgaggaacgattt

SEQ ID NO: 61 - DNA, 24 bp, Artificial Sequence
  chemically treated genomic DNA (Homo sapiens)
ttatttcgttgtcgggtttaagcg

SEQ ID NO: 62 - DNA, 20 bp, Artificial Sequence
  chemically treated genomic DNA (Homo sapiens)
ggagtggaggaaattgagat

SEQ ID NO: 63 - DNA, 22 bp, Artificial Sequence
  chemically treated genomic DNA (Homo sapiens)
ccacacaacaaatactcaaaac

SEQ ID NO: 64 - DNA, 33 bp, Artificial Sequence
  chemically treated genomic DNA (Homo sapiens)
tgggtgtttgtaatttttgttttgtgttaggtt

SEQ ID NO: 65 - DNA, 22 bp, Artificial Sequence
  chemically treated genomic DNA (Homo sapiens)
gtagtagtagtagggtagagag

SEQ ID NO: 66 - DNA, 19 bp, Artificial Sequence
  chemically treated genomic DNA (Homo sapiens)
catccccctacaacctaaa

SEQ ID NO: 67 - DNA, 35 bp, Artificial Sequence
  chemically treated genomic DNA (Homo sapiens)
caacctaaacaacacactcccacacactaaaacac

SEQ ID NO: 68 - DNA, 16 bp, Artificial Sequence
  chemically treated genomic DNA (Homo sapiens)
cgcgggagagggcgtt

SEQ ID NO: 69 - DNA, 19 bp, Artificial Sequence
  chemically treated genomic DNA (Homo sapiens)
tgttggcgatcggcgtttt

SEQ ID NO: 70 - DNA, 16 bp, Artificial Sequence
  chemically treated genomic DNA (Homo sapiens)
gggtttcgggcgggta

SEQ ID NO: 71 - DNA, 21 bp, Artificial Sequence
  chemically treated genomic DNA (Homo sapiens)
atatcgcactcgctatcgcta

SEQ ID NO: 72 - DNA, 23 bp, Artificial Sequence
  chemically treated genomic DNA (Homo sapiens)
gagggcgacggtacgttagaggt

SEQ ID NO: 73 - DNA, 24 bp, Artificial Sequence
  chemically treated genomic DNA (Homo sapiens)
ttgggcgtcgttattagttcggtc

SEQ ID NO: 74 - DNA, 19 bp, Artificial Sequence
  chemically treated genomic DNA (Homo sapiens)
gtcgggttggagggacgta

SEQ ID NO: 75 - DNA, 21 bp, Artificial Sequence
  chemically treated genomic DNA (Homo sapiens)
atatcgcactcgctatcgcta

SEQ ID NO: 76 - DNA, 23 bp, Artificial Sequence
  chemically treated genomic DNA (Homo sapiens)
gagggcgacggtacgttagaggt

SEQ ID NO: 77 - DNA, 24 bp, Artificial Sequence
  chemically treated genomic DNA (Homo sapiens)
ttgggcgtcgttattagttcggtc

SEQ ID NO: 78 - DNA, 21 bp, Artificial Sequence
  chemically treated genomic DNA (Homo sapiens)
gaggtgttagaggagtagtag

SEQ ID NO: 79 - DNA, 17 bp, Artificial Sequence
  chemically treated genomic DNA (Homo sapiens)
tccccctacaacctaaa

SEQ ID NO: 80 - DNA, 37 bp, Artificial Sequence
  chemically treated genomic DNA (Homo sapiens)
acctaaacaacacactcccacacactaaaacaccaat

SEQ ID NO: 81 - DNA, 15 bp, Artificial Sequence
  chemically treated genomic DNA (Homo sapiens)
cgagtcggcgcggga

SEQ ID NO: 82 - DNA, 20 bp, Artificial Sequence
  chemically treated genomic DNA (Homo sapiens)
agggcgttttgttggcgatc

SEQ ID NO: 83 - DNA, 25 bp, Artificial Sequence
  chemically treated genomic DNA (Homo sapiens)
aaaaaaaaaaaactcctctacatac

SEQ ID NO: 84 - DNA, 24 bp, Artificial Sequence
  chemically treated genomic DNA (Homo sapiens)
ggttattgtttgggttaataaatg

SEQ ID NO: 85 - DNA, 38 bp, Artificial Sequence
  chemically treated genomic DNA (Homo sapiens)
acatacaccacaaataaattaccaaaaacatcaaccaa

SEQ ID NO: 86 - DNA, 21 bp, Artificial Sequence
  chemically treated genomic DNA (Homo sapiens)
ttttttttttcggacgtcgtt

SEQ ID NO: 87 - DNA, 20 bp, Artificial Sequence
  chemically treated genomic DNA (Homo sapiens)
tcggtcgatgttttcggtaa

SEQ ID NO: 88 - DNA, 20 bp, Artificial Sequence
  chemically treated genomic DNA (Homo sapiens)
tgagagagagagggttgaaa

SEQ ID NO: 89 - DNA, 24 bp, Artificial Sequence
  chemically treated genomic DNA (Homo sapiens)
tctaaataacaaaatacctccatt

SEQ ID NO: 90 - DNA, 27 bp, Artificial Sequence
  chemically treated genomic DNA (Homo sapiens)
ccattaccaacacaacccaccaaccaa

SEQ ID NO: 91 - DNA, 16 bp, Artificial Sequence
  chemically treated genomic DNA (Homo sapiens)
cgacccgccaaccgac

SEQ ID NO: 92 - DNA, 15 bp, Artificial Sequence
  chemically treated genomic DNA (Homo sapiens)
cgccgaaacgcgctc

SEQ ID NO: 93 - DNA, 26 bp, Artificial Sequence
  chemically treated genomic DNA (Homo sapiens)
gtagtagttagtttagtatttatttt

SEQ ID NO: 94 - DNA, 17 bp, Artificial Sequence
  chemically treated genomic DNA (Homo sapiens)
cccaccaaccatcatat

SEQ ID NO: 95 - DNA, 32 bp, Artificial Sequence; identical to SEQ ID NO: 54
  chemically treated genomic DNA (Homo sapiens)

SEQ ID NO: 96 - DNA, 19 bp, Artificial Sequence
  chemically treated genomic DNA (Homo sapiens)
gaaccccgcgatcaacgcg

SEQ ID NO: 97 - DNA, 26 bp, Artificial Sequence
  chemically treated genomic DNA (Homo sapiens)
gtagtagttagtttagtatttatttt

SEQ ID NO: 98 - DNA, 17 bp, Artificial Sequence
  chemically treated genomic DNA (Homo sapiens)
cccaccaaccatcatat

SEQ ID NO: 99 - DNA, 32 bp, Artificial Sequence; identical to SEQ ID NO: 54
  chemically treated genomic DNA (Homo sapiens)

SEQ ID NO: 100 - DNA, 25 bp, Artificial Sequence
  chemically treated genomic DNA (Homo sapiens)
gttcgaaatgattttatttagttgc

SEQ ID NO: 101 - DNA, 17 bp, Artificial Sequence
  chemically treated genomic DNA (Homo sapiens)
cgttgatcgcggggttc

SEQ ID NO: 102 - DNA, 20 bp, Artificial Sequence
  chemically treated genomic DNA (Homo sapiens)
ccaaaacctaaacttacaac

SEQ ID NO: 103 - DNA, 17 bp, Artificial Sequence
  chemically treated genomic DNA (Homo sapiens)
ggaaatttgaggggtaa

SEQ ID NO: 104 - DNA, 31 bp, Artificial Sequence
  chemically treated genomic DNA (Homo sapiens)
tacaacaccaccaacaaacccaaaaacacaa

SEQ ID NO: 105 - DNA, 19 bp, Artificial Sequence
  chemically treated genomic DNA (Homo sapiens)
gttaattgcgggcgatcga

SEQ ID NO: 106 - DNA, 17 bp, Artificial Sequence
  chemically treated genomic DNA (Homo sapiens)
cgtcgttagcgggtggg

SEQ ID NO: 107 - DNA, 20 bp, Artificial Sequence
  chemically treated genomic DNA (Homo sapiens)
aaaatcctctccaacacgtc

SEQ ID NO: 108 - DNA, 20 bp, Artificial Sequence
  chemically treated genomic DNA (Homo sapiens)
cgcgattcgttgtttattag

SEQ ID NO: 109 - DNA, 25 bp, Artificial Sequence
  chemically treated genomic DNA (Homo sapiens)
cggatttcgcggttaacgcgtagtt

SEQ ID NO: 110 - DNA, 24 bp, Artificial Sequence
  chemically treated genomic DNA (Homo sapiens)
tctaaataacaaaatacctccatt

SEQ ID NO: 111 - DNA, 25 bp, Artificial Sequence
  chemically treated genomic DNA (Homo sapiens)
gttttttttattagttggaagattt

SEQ ID NO: 112 - DNA, 20 bp, Artificial Sequence
  chemically treated genomic DNA (Homo sapiens)
aaactacaacaaaccttatc

SEQ ID NO: 113 - DNA, 37 bp, Artificial Sequence
  chemically treated genomic DNA (Homo sapiens)
ccttatccacactaaaacaaacaaacaacacacaaac

SEQ ID NO: 114 - DNA, 17 bp, Artificial Sequence
  chemically treated genomic DNA (Homo sapiens)
cgtttacggttcgcgcg

SEQ ID NO: 115 - DNA, 20 bp, Artificial Sequence
  chemically treated genomic DNA (Homo sapiens)
cgttcgtttgttttagcgcg

SEQ ID NO: 116 - DNA, 23 bp, Artificial Sequence
  chemically treated genomic DNA (Homo sapiens)
ggtgttgtttattttagagagtt

SEQ ID NO: 117 - DNA, 17 bp, Artificial Sequence
  chemically treated genomic DNA (Homo sapiens)
ctcccctaacccctatc

SEQ ID NO: 118 - DNA, 29 bp, Artificial Sequence
  chemically treated genomic DNA (Homo sapiens)
ctatccttcaccaccttcccaacactaca

SEQ ID NO: 119 - DNA, 16 bp, Artificial Sequence
  chemically treated genomic DNA (Homo sapiens)
ttaggggggcgcggga

SEQ ID NO: 120 - DNA, 21 bp, Artificial Sequence
  chemically treated genomic DNA (Homo sapiens)
gttagatgcgtcgtagcgttg

SEQ ID NO: 121 - DNA, 20 bp, Artificial Sequence
  chemically treated genomic DNA (Homo sapiens)
aaaatcctctccaacacgtc

SEQ ID NO: 122 - DNA, 20 bp, Artificial Sequence
  chemically treated genomic DNA (Homo sapiens)
cgcgattcgttgtttattag

SEQ ID NO: 123 - DNA, 25 bp, Artificial Sequence
  chemically treated genomic DNA (Homo sapiens)
cggatttcgcggttaacgcgtagtt

SEQ ID NO: 124 - DNA, 20 bp, Artificial Sequence
  chemically treated genomic DNA (Homo sapiens)
aaaatcctctccaacacgtc

SEQ ID NO: 125 - DNA, 20 bp, Artificial Sequence
  chemically treated genomic DNA (Homo sapiens)
cgcgattcgttgtttattag

SEQ ID NO: 126 - DNA, 25 bp, Artificial Sequence
  chemically treated genomic DNA (Homo sapiens)
cggatttcgcggttaacgcgtagtt

SEQ ID NO: 127 - DNA, 26 bp, Artificial Sequence
  chemically treated genomic DNA (Homo sapiens)
gtagtagttagtttagtatttatttt

SEQ ID NO: 128 - DNA, 17 bp, Artificial Sequence
  chemically treated genomic DNA (Homo sapiens)
cccaccaaccatcatat

SEQ ID NO: 129 - DNA, 493 bp, Artificial Sequence
  chemically treated genomic DNA (Homo sapiens)
ccttctccagggctcacccaggagggtgcagcggtggcccccggggcggtggtcgtggtgggggtgttagctgcaggggtgccctcggtgggtgggagttggtggcctctcgctggtgccatgggactcgcatgttcgccctgcgcccctcggctcttgagcccacaggccgggatcctgcctgccagccgcgtgcgctgccgtttaacccttgcaggcgcagagcgcgcggcggcggtgacagagaactttgtttggctgcccaaatacagcctcctgcagaaggaccctgcgcccggggaaggggaggaatctcttcccctctgggcgcccgccctcctcgccatggcccggcctccacatccgcccacatctggccgcagcggggcgcccggggggaggggctgaggccgcgtctctcgccgtcccctgggcgcgggccaggcggggaggaggggggcgctccggtcgtgtgcccaggactgtcccccag

SEQ ID NO: 130 - DNA, 21 bp, Artificial Sequence
  chemically treated genomic DNA (Homo sapiens)
ccttctccaaaactcacccaa

SEQ ID NO: 131 - DNA, 22 bp, Artificial Sequence
  chemically treated genomic DNA (Homo sapiens)
ttgggggatagttttgggtata

SEQ ID NO: 132 - DNA, 427 bp, Artificial Sequence
  chemically treated genomic DNA (Homo sapiens)
tgtgcccaggactgtcccccagcggccactcgggccccagccccccaggcctggccttgacaggcgggcggagcagccagtgcgagacagggaggccggtgcgggtgcgggaacctgatccgcccgggaggcgggggcggggcgggggcgcagcgcgcggggaggggccggcgcccgccttcctcccccattcattcagctgagccagggggcctaggggctcctccggcggctagctctgcactgcaggagcgcgggcgcggcgccccagccagcgcgcagggcccgggccccgccgggggcgcttcctcgccgctgccctccgcgcgacccgctgcccaccagccatcatgtcggaccccgcggtcaacgcgcagctggatgggatcatttcggacttcgaaggtgggtgctgggctggctgctg

SEQ ID NO: 133 - DNA, 22 bp, Artificial Sequence
  chemically treated genomic DNA (Homo sapiens)
tatacccaaaactatcccccaa

SEQ ID NO: 134 - DNA, 26 bp, Artificial Sequence
  chemically treated genomic DNA (Homo sapiens)
gtagtagttagtttagtatttatttt

SEQ ID NO: 135 - DNA, 556 bp, Artificial Sequence
  chemically treated genomic DNA (Homo sapiens)
gctagctctgcactgcaggagcgcgggcgcggcgccccagccagcgcgcagggcccgggccccgccgggggcgcttcctcgccgctgccctccgcgcgacccgctgcccaccagccatcatgtcggaccccgcggtcaacgcgcagctggatgggatcatttcggacttcgaaggtgggtgctgggctggctgctgcggccgcggacgtgctggagaggaccctgcgggtgggcctggcgcgggacgggggtgcgctgaggggagacgggagtgcgctgaggggagacgggacccctaatccaggcgccctcccgctgagagcgccgcgcgcccccggccccgtgcccgcgccgcctacgtgggggaccctgttaggggcacccgcgtagaccctgcgcgccctcacaggaccctgtgctcgttctgcgcactgccgcctgggtttccttccttttattgttgtttgtgtttgccaagcgacagcgacctcctcgagggctcgcgaggctgcctcggaactctccaggacgcacagtttcactctgggaaatccat

SEQ ID NO: 136 - DNA, 21 bp, Artificial Sequence
  chemically treated genomic DNA (Homo sapiens)
ggttagttttgtattgtagga

SEQ ID NO: 137 - DNA, 25 bp, Artificial Sequence
  chemically treated genomic DNA (Homo sapiens)
ataaatttcccaaaataaaactata

SEQ ID NO: 138 - DNA, 555 bp, Artificial Sequence
  chemically treated genomic DNA (Homo sapiens)
cacagtttcactctgggaaatccatcggtcccctccctttggctctccccggcggctctcgggccccgcttggacccggcaacgggatagggaggtcgttcctcacctccgactgagtggacagccgcgtcctgctcgggtggacagccctcccctcccccacgccagtttcggggccgccaagttgtgcagcccgtgggccgggagcaccgaacggacacagcccaggtcgtggcagggtctagagtgggatgtcccatggcccccatccaggcctggggatatcctcatccgcctcccagaatcgggccgtgggggacagaaggggcctgcgtgcgggcagggagagtattttggctctctcctgtcttcggggtttacaaagtgtgttgggacttgcggggctgctctgtccaagcctgggtctggcgtccgcgtctctgagcctgtgagtgcgtgcgctttcctgcgtcctcttgactgccggtgctggggctctgcgtcctgcgtccgcgggagtaaatacagcaggcgaaggggaagctcacacaatgg

SEQ ID NO: 139 - DNA, 24 bp, Artificial Sequence
  chemically treated genomic DNA (Homo sapiens)
gtatagttttattttgggaaattt

SEQ ID NO: 140 - DNA, 21 bp, Artificial Sequence
  chemically treated genomic DNA (Homo sapiens)
ccattatataaacttcccctt

SEQ ID NO: 141 - DNA, 529 bp, Artificial Sequence
  chemically treated genomic DNA (Homo sapiens)
tgcaagttttgcatcctctcaccactgcctgcgttacccgagttgtaaagggcggctccctgtgtctgccccgctgcaccgatacaccgagctgcgcacggtgcccagcgcagggagaacaaatgatcatctgtccaacgcgcccatttacaggtgaggaaactaaggctccaactcaatcgacgcactctgcccttttgattaccagaaaagtagcaggacaggtgtcctgtcccgccctaccccggcccactaagccggcaccccggctccgacccccggctgtgcccggcgccgccgcggtgcccggcgccgccgcctcgcccggcggggccgcccggagcgcccgcacctccgcccgcttccacctggccgggcccgccccgcccggactcgggactgggaagtgcggcgactcccggaaccagccattggcgccagcgcggggagctgggggtgcagagctgcgggcgcggcgggccacgcaggcggcccccacccccggcctggcctggtctggtctggtctg

SEQ ID NO: 142 - DNA, 28 bp, Artificial Sequence
  chemically treated genomic DNA (Homo sapiens)
tgtaagttttgtatttttttattattgt

SEQ ID NO: 143 - DNA, 23 bp, Artificial Sequence
  chemically treated genomic DNA (Homo sapiens)
caaaccaaaccaaaccaaaccaa

SEQ ID NO: 144 - DNA, 550 bp, Artificial Sequence
  chemically treated genomic DNA (Homo sapiens)
gcctggcctggtctggtctggtctgcgctgccgcgcgggggcgccccctcccaggcccggcgcccgccagccccgctccgccaggtgcagcgcagcgcaggggtgggcgggggtggggctcggcgcgcacgttcacggggcggggagggggcgggtcaggggcgggaccacagccggctgggccggggttctatgcgcatctccggggaggggcggggcgggggcggggccggggcggggcccggtcggtgcactccagacggcgggccgccccctcttcccgccttcctactaccggcccaggattagcgccctgggagcgcgcgccccgctgcctcgccgccacactttcctgggagcggcggccacggaggcaccatgaagaagtcttactcaggtgggcttcgcgcccggggtggggaggggtcggtgtcccgggaccagcgctgctcacctgagtgcctgcggccgggagtggcgaggcgcccccggagctgagcgagtccccgcggcgggcacactgcaggtcgagttcctcccaggacagggc

SEQ ID NO: 145 - DNA, 25 bp, Artificial Sequence
  chemically treated genomic DNA (Homo sapiens)
acctaacctaatctaatctaatcta

SEQ ID NO: 146 - DNA, 20 bp, Artificial Sequence
  chemically treated genomic DNA (Homo sapiens)
gttttgttttgggaggaatt

SEQ ID NO: 147 - DNA, 423 bp, Artificial Sequence
  chemically treated genomic DNA (Homo sapiens)
agttcctcccaggacagggccgctgtcgggccgctttcgacctgagccgaccgtcccctgcgctgtctccagcccttgctcgagtgtcggaggggctgccctgggggacgctccctcttcctcgccccttgcaccctcgcaggaatcgctgactttccaggtcggccgggtgctttgggtccctgtgcgtctgtgtgggtgaatggggtcggggctaggtggaggggtgtccttgggttcagcctctagggctggtggtccaggccgcagcatcctttcttcggattctcttcggtttctcctctacttagtggggcacgggacggcctccagatgggaccgtccagcagcgcccaaacttggcgactcgggttcacgttttgcgctcaggacgccgcccgcggctgacatcctcactccacc

SEQ ID NO: 148 - DNA, 20 bp, Artificial Sequence
  chemically treated genomic DNA (Homo sapiens)
aattcctcccaaaacaaaac

SEQ ID NO: 149 - DNA, 20 bp, Artificial Sequence
  chemically treated genomic DNA (Homo sapiens)
ggtggagtgaggatgttagt

SEQ ID NO: 150 - DNA, 282 bp, Artificial Sequence
  chemically treated genomic DNA (Homo sapiens)
cctgcctgtgaagatcatatgggccaggctgcggagggccaggcatgcccgccgggagtgcagctggtccacgggaagcatctggagtggctgggaatgggcgcaggagcagcgccgtgggagcacaggtctctttcccggggcggctcacctggtgtcttggttcctgcaaggtaggccgaaagggtggggaggaaactgccagctccttacagcgctgggatggtggccccagggttcctgaggccagcggatgtgggtgcctgtcaccatgtgggttgc

SEQ ID NO: 151 - DNA, 27 bp, Artificial Sequence
  chemically treated genomic DNA (Homo sapiens)
cctacctataaaaatcatataaaccaa

SEQ ID NO: 152 - DNA, 28 bp, Artificial Sequence
  chemically treated genomic DNA (Homo sapiens)
gtaatttatatggtgataggtatttata

SEQ ID NO: 153 - DNA, 459 bp, Artificial Sequence
  chemically treated genomic DNA (Homo sapiens)
gtgtggtaggaatcttccaggaagtccccgtcccgttcgccctctctgcctgggcggggacggcaactgcctctgtcactgcagactaatgggacggaggggggtgacttctcagggttcctcctgggcaggtgctccggaaccttttctcagcacgctggcctggggcacggccgttcctcctgcccagccacgttggggtacagggtgaagaagggctggggccagcccaggacagaggaaggcgaggcaggcacgcaggaactgggctttttaaacccttaagcccaaggaaatcgtagcatcgcgggacagggaaaatgaaagactttggaagtcgtcaggaatttgactctgtgagttggtttccaagagtctaagttaagcatctccaagtggatattaaaaaggagcagcaagcctcggggcggcgggggctggaggaggtggagagaggag

SEQ ID NO: 154 - DNA, 26 bp, Artificial Sequence
  chemically treated genomic DNA (Homo sapiens)
gtgtggtaggaattttttaggaagtt

SEQ ID NO: 155 - DNA, 22 bp, Artificial Sequence
  chemically treated genomic DNA (Homo sapiens)
ctcctctctccacctcctccaa

SEQ ID NO: 156 - DNA, 260 bp, Artificial Sequence
  chemically treated genomic DNA (Homo sapiens)
gaagaaattagaccagacaaagagtgtttttagaggaggaggaggaggaggaggaggctgagagagggagggcgacgggggtgagaaaggggaggccgcctctgagcgggacgccgggactcccgccgctgctaaatatatccgtaggaatggagagggaccggatctcaggtacgcagacagccccctccccatcggccgccccccactgccctggactcggggctttatttatgcctgggggaataagcatgcaaagg

SEQ ID NO: 157 - DNA, 27 bp, Artificial Sequence
  chemically treated genomic DNA (Homo sapiens)
gaagaaattagattagataaagagtgt

SEQ ID NO: 158 - DNA, 23 bp, Artificial Sequence
  chemically treated genomic DNA (Homo sapiens)
cctttacatacttattcccccaa

SEQ ID NO: 159 - DNA, 1818 bp, Homo Sapiens
cgtcgcccgtccctggcttctctgacagccgtgttccatccccgccctgtgccccttctcccggacagtgccttctccagggctcacccaggagggtgcagcggtggcccccggggcggtggtcgtggtgggggtgttagctgcaggggtgccctcggtgggtgggagttggtggcctctcgctggtgccatgggactcgcatgttcgccctgcgcccctcggctcttgagcccacaggccgggatcctgcctgccagccgcgtgcgctgccgtttaacccttgcaggcgcagagcgcgcggcggcggtgacagagaactttgtttggctgcccaaatacagcctcctgcagaaggaccctgcgcccggggaaggggaggaatctcttcccctctgggcgcccgccctcctcgccatggcccggcctccacatccgcccacatctggccgcagcggggcgcccggggggaggggctgaggccgcgtctctcgccgtcccctgggcgcgggccaggcggggaggaggggggcgctccggtcgtgtgcccaggactgtcccccagcggccactcgggccccagccccccaggcctggccttgacaggcgggcggagcagccagtgcgagacagggaggccggtgcgggtgcgggaacctgatccgcccgggaggcgggggcggggcgggggcgcagcgcgcggggaggggccggcgcccgccttcctcccccattcattcagctgagccagggggcctaggggctcctccggcggctagctctgcactgcaggagcgcgggcgcggcgccccagccagcgcgcagggcccgggccccgccgggggcgcttcctcgccgctgccctccgcgcgacccgctgcccaccagccatcatgtcggaccccgcggtcaacgcgcagctggatgggatcatttcggacttcgaaggtgggtgctgggctggctgctgcggccgcggacgtgctggagaggaccctgcgggtgggcctggcgcgggacgggggtgcgctgaggggagacgggagtgcgctgaggggagacgggacccctaatccaggcgccctcccgctgagagcgccgcgcgcccccggccccgtgcccgcgccgcctacgtgggggaccctgttaggggcacccgcgtagaccctgcgcgccctcacaggaccctgtgctcgttctgcgcactgccgcctgggtttccttccttttattgttgtttgtgtttgccaagcgacagcgacctcctcgagggctcgcgaggctgcctcggaactctccaggacgcacagtttcactctgggaaatccatcggtcccctccctttggctctccccggcggctctcgggccccgcttggacccggcaacgggatagggaggtcgttcctcacctccgactgagtggacagccgcgtcctgctcgggtggacagccctcccctcccccacgccagtttcggggccgccaagttgtgcagcccgtgggccgggagcaccgaacggacacagcccaggtcgtggcagggtctagagtgggatgtcccatggcccccatccaggcctggggatatcctcatccgcctcccagaatcgggccgtgggggacagaaggggcctgcgtgcgggcagggagagtattttggctctctcctgtcttcggggtttacaaagtgtgttgggacttgcggggctgctctgtccaagcctgggtctggcgtccgcgtctctgagcctgtgagtgcgtgcgctttcctgcgtcctcttgactgccggtgctggggctctgcgtcctgcgtccgcg

SEQ ID NO: 160 - DNA, 1818 bp, Artificial Sequence
  chemically treated genomic DNA (Homo sapiens)
cgtcgttcgtttttggtttttttgatagtcgtgttttattttcgttttgtgttttttttttcggatagtgttttttttagggtttatttaggagggtgtagcggtggttttcggggcggtggtcgtggtgggggtgttagttgtaggggtgttttcggtgggtgggagttggtggtttttcgttggtgttatgggattcgtatgttcgttttgcgtttttcggtttttgagtttataggtcgggattttgtttgttagtcgcgtgcgttgtcgtttaatttttgtaggcgtagagcgcgcggcggcggtgatagagaattttgtttggttgtttaaatatagttttttgtagaaggattttgcgttcggggaaggggaggaatttttttttttttgggcgttcgtttttttcgttatggttcggtttttatattcgtttatatttggtcgtagcggggcgttcggggggaggggttgaggtcgcgtttttcgtcgttttttgggcgcgggttaggcggggaggaggggggcgtttcggtcgtgtgtttaggattgttttttagcggttattcgggttttagttttttaggtttggttttgataggcgggcggagtagttagtgcgagatagggaggtcggtgcgggtgcgggaatttgattcgttcgggaggcgggggcggggcgggggcgtagcgcgcggggaggggtcggcgttcgttttttttttttatttatttagttgagttagggggtttaggggttttttcggcggttagttttgtattgtaggagcgcgggcgcggcgttttagttagcgcgtagggttcgggtttcgtcgggggcgttttttcgtcgttgtttttcgcgcgattcgttgtttattagttattatgtcggatttcgcggttaacgcgtagttggatgggattatttcggatttcgaaggtgggtgttgggttggttgttgcggtcgcggacgtgttggagaggattttgcgggtgggtttggcgcgggacgggggtgcgttgaggggagacgggagtgcgttgaggggagacgggatttttaatttaggcgttttttcgttgagagcgtcgcgcgttttcggtttcgtgttcgcgtcgtttacgtgggggattttgttaggggtattcgcgtagattttgcgcgtttttataggattttgtgttcgttttgcgtattgtcgtttgggtttttttttttttattgttgtttgtgtttgttaagcgatagcgattttttcgagggttcgcgaggttgtttcggaattttttaggacgtatagttttattttgggaaatttatcggttttttttttttggtttttttcggcggttttcgggtttcgtttggattcggtaacgggatagggaggtcgttttttattttcgattgagtggatagtcgcgttttgttcgggtggatagttttttttttttttacgttagtttcggggtcgttaagttgtgtagttcgtgggtcgggagtatcgaacggatatagtttaggtcgtggtagggtttagagtgggatgttttatggtttttatttaggtttggggatatttttattcgttttttagaatcgggtcgtgggggatagaaggggtttgcgtgcgggtagggagagtattttggtttttttttgttttcggggtttataaagtgtgttgggatttgcggggttgttttgtttaagtttgggtttggcgttcgcgtttttgagtttgtgagtgcgtgcgtttttttgcgtttttttgattgtcggtgttggggttttgcgttttgcgttcgcg

SEQ ID NO: 161 - DNA, 1818 bp, Artificial Sequence
  chemically treated genomic DNA (Homo sapiens)
cgcggacgtaggacgtagagttttagtatcggtagttaagaggacgtaggaaagcgtacgtatttataggtttagagacgcggacgttagatttaggtttggatagagtagtttcgtaagttttaatatattttgtaaatttcgaagataggagagagttaaaatattttttttgttcgtacgtaggttttttttgttttttacggttcgattttgggaggcggatgaggatatttttaggtttggatgggggttatgggatattttattttagattttgttacgatttgggttgtgttcgttcggtgttttcggtttacgggttgtataatttggcggtttcgaaattggcgtgggggaggggagggttgtttattcgagtaggacgcggttgtttatttagtcggaggtgaggaacgatttttttatttcgttgtcgggtttaagcggggttcgagagtcgtcggggagagttaaagggaggggatcgatggattttttagagtgaaattgtgcgttttggagagtttcgaggtagtttcgcgagttttcgaggaggtcgttgtcgtttggtaaatataaataataataaaaggaaggaaatttaggcggtagtgcgtagaacgagtatagggttttgtgagggcgcgtagggtttacgcgggtgtttttaatagggttttttacgtaggcggcgcgggtacggggtcgggggcgcgcggcgtttttagcgggagggcgtttggattaggggtttcgtttttttttagcgtattttcgtttttttttagcgtattttcgtttcgcgttaggtttattcgtagggttttttttagtacgttcgcggtcgtagtagttagtttagtatttattttcgaagttcgaaatgattttatttagttgcgcgttgatcgcggggttcgatatgatggttggtgggtagcgggtcgcgcggagggtagcggcgaggaagcgttttcggcggggttcgggttttgcgcgttggttggggcgtcgcgttcgcgtttttgtagtgtagagttagtcgtcggaggagtttttaggttttttggtttagttgaatgaatgggggaggaaggcgggcgtcggttttttttcgcgcgttgcgttttcgtttcgttttcgtttttcgggcggattaggttttcgtattcgtatcggtttttttgtttcgtattggttgtttcgttcgtttgttaaggttaggtttggggggttggggttcgagtggtcgttgggggatagttttgggtatacgatcggagcgtttttttttttttcgtttggttcgcgtttaggggacggcgagagacgcggttttagttttttttttcgggcgtttcgttgcggttagatgtgggcggatgtggaggtcgggttatggcgaggagggcgggcgtttagaggggaagagattttttttttttttcgggcgtagggtttttttgtaggaggttgtatttgggtagttaaataaagttttttgttatcgtcgtcgcgcgttttgcgtttgtaagggttaaacggtagcgtacgcggttggtaggtaggatttcggtttgtgggtttaagagtcgaggggcgtagggcgaatatgcgagttttatggtattagcgagaggttattaatttttatttatcgagggtatttttgtagttaatatttttattacgattatcgtttcgggggttatcgttgtatttttttgggtgagttttggagaaggtattgttcgggagaaggggtatagggcggggatggaatacggttgttagagaagttagggacgggcgacg

SEQ ID NO: 162 - DNA, 1818 bp, Artificial Sequence
  chemically treated genomic DNA (Homo sapiens)
tgttgtttgtttttggtttttttgatagttgtgttttatttttgttttgtgtttttttttttggatagtgttttttttagggtttatttaggagggtgtagtggtggtttttggggtggtggttgtggtgggggtgttagttgtaggggtgtttttggtgggtgggagttggtggttttttgttggtgttatgggatttgtatgtttgttttgtgttttttggtttttgagtttataggttgggattttgtttgttagttgtgtgtgttgttgtttaatttttgtaggtgtagagtgtgtggtggtggtgatagagaattttgtttggttgtttaaatatagttttttgtagaaggattttgtgtttggggaaggggaggaatttttttttttttgggtgtttgttttttttgttatggtttggtttttatatttgtttatatttggttgtagtggggtgtttggggggaggggttgaggttgtgttttttgttgttttttgggtgtgggttaggtggggaggaggggggtgttttggttgtgtgtttaggattgttttttagtggttatttgggttttagttttttaggtttggttttgataggtgggtggagtagttagtgtgagatagggaggttggtgtgggtgtgggaatttgatttgtttgggaggtgggggtggggtgggggtgtagtgtgtggggaggggttggtgtttgttttttttttttatttatttagttgagttagggggtttaggggtttttttggtggttagttttgtattgtaggagtgtgggtgtggtgttttagttagtgtgtagggtttgggttttgttgggggtgtttttttgttgttgttttttgtgtgatttgttgtttattagttattatgttggattttgtggttaatgtgtagttggatgggattattttggattttgaaggtgggtgttgggttggttgttgtggttgtggatgtgttggagaggattttgtgggtgggtttggtgtgggatgggggtgtgttgaggggagatgggagtgtgttgaggggagatgggatttttaatttaggtgtttttttgttgagagtgttgtgtgtttttggttttgtgtttgtgttgtttatgtgggggattttgttaggggtatttgtgtagattttgtgtgtttttataggattttgtgtttgttttgtgtattgttgtttgggtttttttttttttattgttgtttgtgtttgttaagtgatagtgatttttttgagggtttgtgaggttgttttggaattttttaggatgtatagttttattttgggaaatttattggttttttttttttggttttttttggtggtttttgggttttgtttggatttggtaatgggatagggaggttgttttttatttttgattgagtggatagttgtgttttgtttgggtggatagttttttttttttttatgttagttttggggttgttaagttgtgtagtttgtgggttgggagtattgaatggatatagtttaggttgtggtagggtttagagtgggatgttttatggtttttatttaggtttggggatatttttatttgttttttagaattgggttgtgggggatagaaggggtttgtgtgtgggtagggagagtattttggtttttttttgtttttggggtttataaagtgtgttgggatttgtggggttgttttgtttaagtttgggtttggtgtttgtgtttttgagtttgtgagtgtgtgtgtttttttgtgtttttttgattgttggtgttggggttttgtgttttgtgtttgtg

SEQ ID NO: 163 - DNA, 1818 bp, Artificial Sequence
  chemically treated genomic DNA (Homo sapiens)
tgtggatgtaggatgtagagttttagtattggtagttaagaggatgtaggaaagtgtatgtatttataggtttagagatgtggatgttagatttaggtttggatagagtagttttgtaagttttaatatattttgtaaattttgaagataggagagagttaaaatattttttttgtttgtatgtaggttttttttgttttttatggtttgattttgggaggtggatgaggatatttttaggtttggatgggggttatgggatattttattttagattttgttatgatttgggttgtgtttgtttggtgtttttggtttatgggttgtataatttggtggttttgaaattggtgtgggggaggggagggttgtttatttgagtaggatgtggttgtttatttagttggaggtgaggaatgatttttttattttgttgttgggtttaagtggggtttgagagttgttggggagagttaaagggaggggattgatggattttttagagtgaaattgtgtgttttggagagttttgaggtagttttgtgagtttttgaggaggttgttgttgtttggtaaatataaataataataaaaggaaggaaatttaggtggtagtgtgtagaatgagtatagggttttgtgagggtgtgtagggtttatgtgggtgtttttaatagggttttttatgtaggtggtgtgggtatggggttgggggtgtgtggtgtttttagtgggagggtgtttggattaggggttttgtttttttttagtgtatttttgtttttttttagtgtatttttgttttgtgttaggtttatttgtagggttttttttagtatgtttgtggttgtagtagttagtttagtatttatttttgaagtttgaaatgattttatttagttgtgtgttgattgtggggtttgatatgatggttggtgggtagtgggttgtgtggagggtagtggtgaggaagtgtttttggtggggtttgggttttgtgtgttggttggggtgttgtgtttgtgtttttgtagtgtagagttagttgttggaggagtttttaggttttttggtttagttgaatgaatgggggaggaaggtgggtgttggtttttttttgtgtgttgtgtttttgttttgtttttgttttttgggtggattaggtttttgtatttgtattggtttttttgttttgtattggttgttttgtttgtttgttaaggttaggtttggggggttggggtttgagtggttgttgggggatagttttgggtatatgattggagtgttttttttttttttgtttggtttgtgtttaggggatggtgagagatgtggttttagtttttttttttgggtgttttgttgtggttagatgtgggtggatgtggaggttgggttatggtgaggagggtgggtgtttagaggggaagagatttttttttttttttgggtgtagggtttttttgtaggaggttgtatttgggtagttaaataaagttttttgttattgttgttgtgtgttttgtgtttgtaagggttaaatggtagtgtatgtggttggtaggtaggattttggtttgtgggtttaagagttgaggggtgtagggtgaatatgtgagttttatggtattagtgagaggttattaatttttatttattgagggtatttttgtagttaatatttttattatgattattgttttgggggttattgttgtatttttttgggtgagttttggagaaggtattgtttgggagaaggggtatagggtggggatggaatatggttgttagagaagttagggatgggtgatg

SEQ ID NO: 164 - DNA, 5562 bp, Homo Sapiens
gcgtcgcccgtccctggcttctctgacagccgtgttccatccccgccctgtgccccttctcccggacagtgccttctccagggctcacccaggagggtgcagcggtggcccccggggcggtggtcgtggtgggggtgttagctgcaggggtgccctcggtgggtgggagttggtggcctctcgctggtgccatgggactcgcatgttcgccctgcgcccctcggctcttgagcccacaggccgggatcctgcctgccagccgcgtgcgctgccgtttaacccttgcaggcgcagagcgcgcggcggcggtgacagagaactttgtttggctgcccaaatacagcctcctgcagaaggaccctgcgcccggggaaggggaggaatctcttcccctctgggcgcccgccctcctcgccatggcccggcctccacatccgcccacatctggccgcagcggggcgcccggggggaggggctgaggccgcgtctctcgccgtcccctgggcgcgggccaggcggggaggaggggggcgctccggtcgtgtgcccaggactgtcccccagcggccactcgggccccagccccccaggcctggccttgacaggcgggcggagcagccagtgcgagacagggaggccggtgcgggtgcgggaacctgatccgcccgggaggcgggggcggggcgggggcgcagcgcgcggggaggggccggcgcccgccttcctcccccattcattcagctgagccagggggcctaggggctcctccggcggctagctctgcactgcaggagcgcgggcgcggcgccccagccagcgcgcagggcccgggccccgccgggggcgcttcctcgccgctgccctccgcgcgacccgctgcccaccagccatcatgtcggaccccgcggtcaacgcgcagctggatgggatcatttcggacttcgaaggtgggtgctgggctggctgctgcggccgcggacgtgctggagaggaccctgcgggtgggcctggcgcgggacgggggtgcgctgaggggagacgggagtgcgctgaggggagacgggacccctaatccaggcgccctcccgctgagagcgccgcgcgcccccggccccgtgcccgcgccgcctacgtgggggaccctgttaggggcacccgcgtagaccctgcgcgccctcacaggaccctgtgctcgttctgcgcactgccgcctgggtttccttccttttattgttgtttgtgtttgccaagcgacagcgacctcctcgagggctcgcgaggctgcctcggaactctccaggacgcacagtttcactctgggaaatccatcggtcccctccctttggctctccccggcggctctcgggccccgcttggacccggcaacgggatagggaggtcgttcctcacctccgactgagtggacagccgcgtcctgctcgggtggacagccctcccctcccccacgccagtttcggggccgccaagttgtgcagcccgtgggccgggagcaccgaacggacacagcccaggtcgtggcagggtctagagtgggatgtcccatggcccccatccaggcctggggatatcctcatccgcctcccagaatcgggccgtgggggacagaaggggcctgcgtgcgggcagggagagtattttggctctctcctgtcttcggggtttacaaagtgtgttgggacttgcggggctgctctgtccaagcctgggtctggcgtccgcgtctctgagcctgtgagtgcgtgcgctttcctgcgtcctcttgactgccggtgctggggctctgcgtcctgcgtccgcgggagtaaatacagcaggcgaaggggaagctcacacaatggtctccagcgctctggggcagggcttctgaggggcgggcctgcctctgccgggacctggagcccccgcccctcggagaggctcctaggctgacttgggcagagccctctggtgggccgggagggggaaaggctgtgttgaaatgagcaaactgtccaggtgtcaggccaagctgggaggtgaccagcctgaggtcctccccgctccatggccagaaccagggctgacatctgggtgtcctgagcccagctgcccacacggcccacctggggtcagccctatctgagtgggggaggcggggcctcctgggggaccagaactttggctggacgccaagcagagtgccagtggctgttcttcagggctgggcctgaggagggtgtggggcggcgaagggacgggagggggttgtgatccagtggccactggcgctgtgcagagtgtgagctggaaacatcgtagttactttgtcagcttagtggtgaaagccctttttcaggctctatccctttgcatccctgcttcccagagggaggggaggtctgggtctgcagagctgggagggcttgctgttcccgcccccctcccccacaacacctcctcatctggacatctttgggcacatgctcatactggggtctccctaggtccactgtgttccgttgagcctcctgcagtccccgagtgaatgtgacctccctgcccctgcctctttgcaactcctccctgcgaccgctcctccaggggccttccttgtcccaaatgtccaagtggcacgacttagccggtctgaccactttccagtaagcccttatggagagaggccctgtgttgtgcagagctctcctcctgcctgcgggatcgaggtctctgctctcagttcctaacagaaagtgtcgggcccccagtgggatttctggggaagaactctcgtgtctcaacgggagccctgtggcgggaggggaggccagggtttggggttgtgttcgttgtacagctgtcaccatttgcactatgaaagttgttagtgccccttccttgggtctctgggtgtaactccacccttgcccccatgtgcctccatctggagctgcttctgcggctgtctcccaagccagttttgtgaccctgtaatttagtccaagacaatgggctcattgagaccatcctggtgcagcagttggcaatcctttggctctgggggaaggtttctcagtctcggggagtggggcctcaatctgctggttccctgtgtttatcagtctcccccttgtgtgtcctgaatggttttgctgggaattctggtcttagagccatcaggtggcccgagtcgataggcgtgagagagtgtgtgtgtgcatgagtgcgcatgtgcatgggggctgacctggggtatggaaaggtggccctccctggtgcccaaggagcctggagtatagttggagggtgtgggggtgtgtatatgggagttggacaaccttgggtggacagacagacgtggggaagggatgattgaaggaggtggaggagagagtgtgattcagcccagccaggggtgatgtggacaggcagcttccgaatcagggtagagaaaagtcaccactagctagcaggggagaagtcagtatggaggaggcggaccttgagggagagtaggaattggattgcaagaggaaggagagccttctggccagcagcagccagcagcagtgggggaggctggaatgagctggctggagagggggctggggcataaggaggggcctgcctgtgaagatcatatgggccaggctgcggagggccaggcatgcccgccgggagtgcagctggtccacgggaagcatctggagtggctgggaatgggcgcaggagcagcgccgtgggagcacaggtctctttcccggggcggctcacctggtgtcttggttcctgcaaggtaggccgaaagggtggggaggaaactgccagctccttacagcgctgggatggtggccccagggttcctgaggccagcggatgtgggtgcctgtcaccatgtgggttgctgaggggcggagactccaggggccaccccaaagcaggacgagctctgagccacggcatctctgggggcagttttccaatcgagcagacgtctaggcctggaatcctgtaacagaggccacagggccctgatcagggtgttctgggaggcttagaactagtggcagtatacagggtagacggcaagtgacctggcatggggaaagaggcaggtgcccaggccggcacagcacacccgtaaggaacaggtagacgggaagccgtccgtgggcctgtgtgtgtgctcggagttaaaattctgccaatgtcccatgtcctgggcacatctaccccctccctggggagcacctttctcttcaccttttccttccccgcctgtccccttcacccagggccttccccatccctcccgtcttggggaccgagggcaccatggctttatgttccatcaccgatgagttgcacagggattcagtccttccgctgttcaggccgggtccttcaggctcagggttcccaggaatggagagggtatcagtgtcttccatggactcaaacttcccgcatcccgcctttgctcccccttcaagataggtctccgagcttcaaggttttagggctctgtggaggccgccacgtagcagcaaggagaatgttttgtatttggctgatgagatttttagagtctcattttctacttttccactgtacaaacgggcctccaggcgactgcagcacccgccactgcccgtaatagggtgacaagagggatgaccctttcctctttctcccttctggttggtggaggcacggggctggcggacggcatgtgctttcgtgaattcaggccaaatctgttatcgcaaacacgattacaactcgggtctttgtgtaacaaaagcctttccaagtaccagctgttggcctgctttgctcagcggtgtttgctgtaaccagatttgcacaccgagaaagaatccaaaagtccttgatgtttgttgaaacaatctggcccaggacccacgtgctcagatcccagagctgtgtggcatctgagcttctcccgagcccccactgtcgcccgaggaggacccccagatctgtgttctggaggcagagcaggctgtgggacgggcttctgggtgggaaggaccatgtggatatgccttcttgtctgagagtcccaacacctccgggacgtgggagctggcgcgctggcaggattcaggtgcctctttcctctctagagaaaaaggccccgttgcttggtaataggtgcagacctgtccctaattaatgccagtaggcctcttgcgtgatgaaccctgcctttcagccaagactcaaggcatcctgtgaatactgcctctctgcagtttgagcttttgtggtgggaggcaggagccatggggagtgggggcaggcctcttacacgggtcccacagccactggcagcactgacttgatgctctttgagttcagagcccagggccagacagacccactgtcccgactacgagttggttcatttagaggggggcggacacagcacccaggcagcagatgcactgtgatcagccttgcagcggggctgtgggttctctgggctggatgtccgggaagaggcaggtggaggtaaacgccaggacacccctgcagtga

SEQ ID NO: 165 - DNA, 1970 bp, Homo Sapiens
ggagagggggctggggcataaggaggggcctgcctgtgaagatcatatgggccaggctgcggagggccaggcatgcccgccgggagtgcagctggtccacgggaagcatctggagtggctgggaatgggcgcaggagcagcgccgtgggagcacaggtctctttcccggggcggctcacctggtgtcttggttcctgcaaggtaggccgaaagggtggggaggaaactgccagctccttacagcgctgggatggtggccccagggttcctgaggccagcggatgtgggtgcctgtcaccatgtgggttgctgaggggcggagactccaggggccaccccaaagcaggacgagctctgagccacggcatctctgggggcagttttccaatcgagcagacgtctaggcctggaatcctgtaacagaggccacagggccctgatcagggtgttctgggaggcttagaactagtggcagtatacagggtagacggcaagtgacctggcatggggaaagaggcaggtgcccaggccggcacagcacacccgtaaggaacaggtagacgggaagccgtccgtgggcctgtgtgtgtgctcggagttaaaattctgccaatgtcccatgtcctgggcacatctaccccctccctggggagcacctttctcttcaccttttccttccccgcctgtccccttcacccagggccttccccatccctcccgtcttggggaccgagggcaccatggctttatgttccatcaccgatgagttgcacagggattcagtccttccgctgttcaggccgggtccttcaggctcagggttcccaggaatggagagggtatcagtgtcttccatggactcaaacttcccgcatcccgcctttgctcccccttcaagataggtctccgagcttcaaggttttagggctctgtggaggccgccacgtagcagcaaggagaatgttttgtatttggctgatgagatttttagagtctcattttctacttttccactgtacaaacgggcctccaggcgactgcagcacccgccactgcccgtaatagggtgacaagagggatgaccctttcctctttctcccttctggttggtggaggcacggggctggcggacggcatgtgctttcgtgaattcaggccaaatctgttatcgcaaacacgattacaactcgggtctttgtgtaacaaaagcctttccaagtaccagctgttggcctgctttgctcagcggtgtttgctgtaaccagatttgcacaccgagaaagaatccaaaagtccttgatgtttgttgaaacaatctggcccaggacccacgtgctcagatcccagagctgtgtggcatctgagcttctcccgagcccccactgtcgcccgaggaggacccccagatctgtgttctggaggcagagcaggctgtgggacgggcttctgggtgggaaggaccatgtggatatgccttcttgtctgagagtcccaacacctccgggacgtgggagctggcgcgctggcaggattcaggtgcctctttcctctctagagaaaaaggccccgttgcttggtaataggtgcagacctgtccctaattaatgccagtaggcctcttgcgtgatgaaccctgcctttcagccaagactcaaggcatcctgtgaatactgcctctctgcagtttgagcttttgtggtgggaggcaggagccatggggagtgggggcaggcctcttacacgggtcccacagccactggcagcactgacttgatgctctttgagttcagagcccagggccagacagacccactgtcccgactacgagttggttcatttagaggggggcggacacagcacccaggcagcagatgcactgtgatcagccttgcagcggggctgtgggttctctgggctggatgtccgggaagaggcaggtggaggtaaacgccaggacacccctgcagtga

SEQ ID NO: 166 - DNA, 5562 bp, Artificial Sequence
  chemically treated genomic DNA (Homo sapiens)
gcgtcgttcgtttttggtttttttgatagtcgtgttttattttcgttttgtgttttttttttcggatagtgttttttttagggtttatttaggagggtgtagcggtggttttcggggcggtggtcgtggtgggggtgttagttgtaggggtgttttcggtgggtgggagttggtggtttttcgttggtgttatgggattcgtatgttcgttttgcgtttttcggtttttgagtttataggtcgggattttgtttgttagtcgcgtgcgttgtcgtttaatttttgtaggcgtagagcgcgcggcggcggtgatagagaattttgtttggttgtttaaatatagttttttgtagaaggattttgcgttcggggaaggggaggaatttttttttttttgggcgttcgtttttttcgttatggttcggtttttatattcgtttatatttggtcgtagcggggcgttcggggggaggggttgaggtcgcgtttttcgtcgttttttgggcgcgggttaggcggggaggaggggggcgtttcggtcgtgtgtttaggattgttttttagcggttattcgggttttagttttttaggtttggttttgataggcgggcggagtagttagtgcgagatagggaggtcggtgcgggtgcgggaatttgattcgttcgggaggcgggggcggggcgggggcgtagcgcgcggggaggggtcggcgttcgttttttttttttatttatttagttgagttagggggtttaggggttttttcggcggttagttttgtattgtaggagcgcgggcgcggcgttttagttagcgcgtagggttcgggtttcgtcgggggcgttttttcgtcgttgtttttcgcgcgattcgttgtttattagttattatgtcggatttcgcggttaacgcgtagttggatgggattatttcggatttcgaaggtgggtgttgggttggttgttgcggtcgcggacgtgttggagaggattttgcgggtgggtttggcgcgggacgggggtgcgttgaggggagacgggagtgcgttgaggggagacgggatttttaatttaggcgttttttcgttgagagcgtcgcgcgttttcggtttcgtgttcgcgtcgtttacgtgggggattttgttaggggtattcgcgtagattttgcgcgtttttataggattttgtgttcgttttgcgtattgtcgtttgggtttttttttttttattgttgtttgtgtttgttaagcgatagcgattttttcgagggttcgcgaggttgtttcggaattttttaggacgtatagttttattttgggaaatttatcggttttttttttttggtttttttcggcggttttcgggtttcgtttggattcggtaacgggatagggaggtcgttttttattttcgattgagtggatagtcgcgttttgttcgggtggatagttttttttttttttacgttagtttcggggtcgttaagttgtgtagttcgtgggtcgggagtatcgaacggatatagtttaggtcgtggtagggtttagagtgggatgttttatggtttttatttaggtttggggatatttttattcgttttttagaatcgggtcgtgggggatagaaggggtttgcgtgcgggtagggagagtattttggtttttttttgttttcggggtttataaagtgtgttgggatttgcggggttgttttgtttaagtttgggtttggcgttcgcgtttttgagtttgtgagtgcgtgcgtttttttgcgtttttttgattgtcggtgttggggttttgcgttttgcgttcgcgggagtaaatatagtaggcgaaggggaagtttatataatggtttttagcgttttggggtagggtttttgaggggcgggtttgtttttgtcgggatttggagttttcgtttttcggagaggtttttaggttgatttgggtagagttttttggtgggtcgggagggggaaaggttgtgttgaaatgagtaaattgtttaggtgttaggttaagttgggaggtgattagtttgaggtttttttcgttttatggttagaattagggttgatatttgggtgttttgagtttagttgtttatacggtttatttggggttagttttatttgagtgggggaggcggggttttttgggggattagaattttggttggacgttaagtagagtgttagtggttgttttttagggttgggtttgaggagggtgtggggcggcgaagggacgggagggggttgtgatttagtggttattggcgttgtgtagagtgtgagttggaaatatcgtagttattttgttagtttagtggtgaaagtttttttttaggttttatttttttgtatttttgttttttagagggaggggaggtttgggtttgtagagttgggagggtttgttgttttcgttttttttttttataatatttttttatttggatatttttgggtatatgtttatattggggtttttttaggtttattgtgtttcgttgagttttttgtagttttcgagtgaatgtgatttttttgtttttgtttttttgtaatttttttttgcgatcgtttttttaggggttttttttgttttaaatgtttaagtggtacgatttagtcggtttgattattttttagtaagtttttatggagagaggttttgtgttgtgtagagttttttttttgtttgcgggatcgaggtttttgtttttagtttttaatagaaagtgtcgggtttttagtgggatttttggggaagaattttcgtgttttaacgggagttttgtggcgggaggggaggttagggtttggggttgtgttcgttgtatagttgttattatttgtattatgaaagttgttagtgttttttttttgggtttttgggtgtaattttatttttgtttttatgtgtttttatttggagttgtttttgcggttgttttttaagttagttttgtgattttgtaatttagtttaagataatgggtttattgagattattttggtgtagtagttggtaattttttggttttgggggaaggttttttagtttcggggagtggggttttaatttgttggttttttgtgtttattagttttttttttgtgtgttttgaatggttttgttgggaattttggttttagagttattaggtggttcgagtcgataggcgtgagagagtgtgtgtgtgtatgagtgcgtatgtgtatgggggttgatttggggtatggaaaggtggttttttttggtgtttaaggagtttggagtatagttggagggtgtgggggtgtgtatatgggagttggataattttgggtggatagatagacgtggggaagggatgattgaaggaggtggaggagagagtgtgatttagtttagttaggggtgatgtggataggtagttttcgaattagggtagagaaaagttattattagttagtaggggagaagttagtatggaggaggcggattttgagggagagtaggaattggattgtaagaggaaggagagttttttggttagtagtagttagtagtagtgggggaggttggaatgagttggttggagagggggttggggtataaggaggggtttgtttgtgaagattatatgggttaggttgcggagggttaggtatgttcgtcgggagtgtagttggtttacgggaagtatttggagtggttgggaatgggcgtaggagtagcgtcgtgggagtataggtttttttttcggggcggtttatttggtgttttggtttttgtaaggtaggtcgaaagggtggggaggaaattgttagttttttatagcgttgggatggtggttttagggtttttgaggttagcggatgtgggtgtttgttattatgtgggttgttgaggggcggagattttaggggttattttaaagtaggacgagttttgagttacggtatttttgggggtagttttttaatcgagtagacgtttaggtttggaattttgtaatagaggttatagggttttgattagggtgttttgggaggtttagaattagtggtagtatatagggtagacggtaagtgatttggtatggggaaagaggtaggtgtttaggtcggtatagtatattcgtaaggaataggtagacgggaagtcgttcgtgggtttgtgtgtgtgttcggagttaaaattttgttaatgttttatgttttgggtatatttattttttttttggggagtatttttttttttatttttttttttttcgtttgttttttttatttagggttttttttatttttttcgttttggggatcgagggtattatggttttatgttttattatcgatgagttgtatagggatttagttttttcgttgtttaggtcgggttttttaggtttagggtttttaggaatggagagggtattagtgttttttatggatttaaatttttcgtatttcgtttttgttttttttttaagataggttttcgagttttaaggttttagggttttgtggaggtcgttacgtagtagtaaggagaatgttttgtatttggttgatgagatttttagagttttattttttatttttttattgtataaacgggtttttaggcgattgtagtattcgttattgttcgtaatagggtgataagagggatgattttttttttttttttttttttggttggtggaggtacggggttggcggacggtatgtgttttcgtgaatttaggttaaatttgttatcgtaaatacgattataattcgggtttttgtgtaataaaagtttttttaagtattagttgttggtttgttttgtttagcggtgtttgttgtaattagatttgtatatcgagaaagaatttaaaagtttttgatgtttgttgaaataatttggtttaggatttacgtgtttagattttagagttgtgtggtatttgagtttttttcgagtttttattgtcgttcgaggaggatttttagatttgtgttttggaggtagagtaggttgtgggacgggtttttgggtgggaaggattatgtggatatgtttttttgtttgagagttttaatattttcgggacgtgggagttggcgcgttggtaggatttaggtgttttttttttttttagagaaaaaggtttcgttgtttggtaataggtgtagatttgtttttaattaatgttagtaggttttttgcgtgatgaattttgttttttagttaagatttaaggtattttgtgaatattgtttttttgtagtttgagtttttgtggtgggaggtaggagttatggggagtgggggtaggttttttatacgggttttatagttattggtagtattgatttgatgttttttgagtttagagtttagggttagatagatttattgtttcgattacgagttggtttatttagaggggggcggatatagtatttaggtagtagatgtattgtgattagttttgtagcggggttgtgggttttttgggttggatgttcgggaagaggtaggtggaggtaaacgttaggatatttttgtagtga

SEQ ID NO: 167 - DNA, 5562 bp, Artificial Sequence
  chemically treated genomic DNA (Homo sapiens)
ttattgtaggggtgttttggcgtttatttttatttgttttttttcggatatttagtttagagaatttatagtttcgttgtaaggttgattatagtgtatttgttgtttgggtgttgtgttcgtttttttttaaatgaattaattcgtagtcgggatagtgggtttgtttggttttgggttttgaatttaaagagtattaagttagtgttgttagtggttgtgggattcgtgtaagaggtttgtttttattttttatggtttttgttttttattataaaagtttaaattgtagagaggtagtatttataggatgttttgagttttggttgaaaggtagggtttattacgtaagaggtttattggtattaattagggataggtttgtatttattattaagtaacggggtttttttttttagagaggaaagaggtatttgaattttgttagcgcgttagtttttacgtttcggaggtgttgggatttttagataagaaggtatatttatatggttttttttatttagaagttcgttttatagtttgttttgtttttagaatatagatttgggggtttttttcgggcgatagtgggggttcgggagaagtttagatgttatatagttttgggatttgagtacgtgggttttgggttagattgttttaataaatattaaggatttttggattttttttcggtgtgtaaatttggttatagtaaatatcgttgagtaaagtaggttaatagttggtatttggaaaggtttttgttatataaagattcgagttgtaatcgtgtttgcgataatagatttggtttgaatttacgaaagtatatgtcgttcgttagtttcgtgtttttattaattagaagggagaaagaggaaagggttattttttttgttattttattacgggtagtggcgggtgttgtagtcgtttggaggttcgtttgtatagtggaaaagtagaaaatgagattttaaaaattttattagttaaatataaaatattttttttgttgttacgtggcggtttttatagagttttaaaattttgaagttcggagatttattttgaagggggagtaaaggcgggatgcgggaagtttgagtttatggaagatattgatattttttttatttttgggaattttgagtttgaaggattcggtttgaatagcggaaggattgaatttttgtgtaatttatcggtgatggaatataaagttatggtgttttcggtttttaagacgggagggatggggaaggttttgggtgaaggggataggcggggaaggaaaaggtgaagagaaaggtgttttttagggagggggtagatgtgtttaggatatgggatattggtagaattttaatttcgagtatatatataggtttacggacggtttttcgtttatttgttttttacgggtgtgttgtgtcggtttgggtatttgtttttttttttatgttaggttatttgtcgtttattttgtatattgttattagttttaagttttttagaatattttgattagggttttgtggtttttgttataggattttaggtttagacgtttgttcgattggaaaattgtttttagagatgtcgtggtttagagttcgttttgttttggggtggtttttggagttttcgttttttagtaatttatatggtgataggtatttatattcgttggttttaggaattttggggttattattttagcgttgtaaggagttggtagttttttttttattttttcggtttattttgtaggaattaagatattaggtgagtcgtttcgggaaagagatttgtgtttttacggcgttgtttttgcgtttatttttagttattttagatgtttttcgtggattagttgtattttcggcgggtatgtttggtttttcgtagtttggtttatatgatttttataggtaggtttttttttatgttttagttttttttttagttagtttattttagttttttttattgttgttggttgttgttggttagaaggttttttttttttttgtaatttaatttttatttttttttaaggttcgttttttttatattgattttttttttgttagttagtggtgatttttttttattttgattcggaagttgtttgtttatattatttttggttgggttgaattatatttttttttttattttttttaattattttttttttacgtttgtttgtttatttaaggttgtttaatttttatatatatatttttatattttttaattatattttaggttttttgggtattagggagggttatttttttatattttaggttagtttttatgtatatgcgtatttatgtatatatatatttttttacgtttatcgattcgggttatttgatggttttaagattagaatttttagtaaaattatttaggatatataagggggagattgataaatatagggaattagtagattgaggttttatttttcgagattgagaaatttttttttagagttaaaggattgttaattgttgtattaggatggttttaatgagtttattgttttggattaaattatagggttataaaattggtttgggagatagtcgtagaagtagttttagatggaggtatatgggggtaagggtggagttatatttagagatttaaggaaggggtattaataatttttatagtgtaaatggtgatagttgtataacgaatataattttaaattttggttttttttttcgttatagggttttcgttgagatacgagagtttttttttagaaattttattgggggttcgatattttttgttaggaattgagagtagagatttcgatttcgtaggtaggaggagagttttgtataatatagggtttttttttataagggtttattggaaagtggttagatcggttaagtcgtgttatttggatatttgggataaggaaggtttttggaggagcggtcgtagggaggagttgtaaagaggtaggggtagggaggttatatttattcggggattgtaggaggtttaacggaatatagtggatttagggagattttagtatgagtatgtgtttaaagatgtttagatgaggaggtgttgtgggggaggggggcgggaatagtaagtttttttagttttgtagatttagattttttttttttttgggaagtagggatgtaaagggatagagtttgaaaaagggtttttattattaagttgataaagtaattacgatgtttttagtttatattttgtatagcgttagtggttattggattataattttttttcgttttttcgtcgttttatattttttttaggtttagttttgaagaatagttattggtattttgtttggcgtttagttaaagttttggttttttaggaggtttcgttttttttatttagatagggttgattttaggtgggtcgtgtgggtagttgggtttaggatatttagatgttagttttggttttggttatggagcggggaggattttaggttggttattttttagtttggtttgatatttggatagtttgtttattttaatatagtttttttttttttcggtttattagagggttttgtttaagttagtttaggagttttttcgaggggcgggggttttaggtttcggtagaggtaggttcgttttttagaagttttgttttagagcgttggagattattgtgtgagtttttttttcgtttgttgtatttattttcgcggacgtaggacgtagagttttagtatcggtagttaagaggacgtaggaaagcgtacgtatttataggtttagagacgcggacgttagatttaggtttggatagagtagtttcgtaagttttaatatattttgtaaatttcgaagataggagagagttaaaatattttttttgttcgtacgtaggttttttttgttttttacggttcgattttgggaggcggatgaggatatttttaggtttggatgggggttatgggatattttattttagattttgttacgatttgggttgtgttcgttcggtgttttcggtttacgggttgtataatttggcggtttcgaaattggcgtgggggaggggagggttgtttattcgagtaggacgcggttgtttatttagtcggaggtgaggaacgatttttttatttcgttgtcgggtttaagcggggttcgagagtcgtcggggagagttaaagggaggggatcgatggattttttagagtgaaattgtgcgttttggagagtttcgaggtagtttcgcgagttttcgaggaggtcgttgtcgtttggtaaatataaataataataaaaggaaggaaatttaggcggtagtgcgtagaacgagtatagggttttgtgagggcgcgtagggtttacgcgggtgtttttaatagggttttttacgtaggcggcgcgggtacggggtcgggggcgcgcggcgtttttagcgggagggcgtttggattaggggtttcgtttttttttagcgtattttcgtttttttttagcgtattttcgtttcgcgttaggtttattcgtagggttttttttagtacgttcgcggtcgtagtagttagtttagtatttattttcgaagttcgaaatgattttatttagttgcgcgttgatcgcggggttcgatatgatggttggtgggtagcgggtcgcgcggagggtagcggcgaggaagcgttttcggcggggttcgggttttgcgcgttggttggggcgtcgcgttcgcgtttttgtagtgtagagttagtcgtcggaggagtttttaggttttttggtttagttgaatgaatgggggaggaaggcgggcgtcggttttttttcgcgcgttgcgttttcgtttcgttttcgtttttcgggcggattaggttttcgtattcgtatcggtttttttgtttcgtattggttgtttcgttcgtttgttaaggttaggtttggggggttggggttcgagtggtcgttgggggatagttttgggtatacgatcggagcgtttttttttttttcgtttggttcgcgtttaggggacggcgagagacgcggttttagttttttttttcgggcgtttcgttgcggttagatgtgggcggatgtggaggtcgggttatggcgaggagggcgggcgtttagaggggaagagattttttttttttttcgggcgtagggtttttttgtaggaggttgtatttgggtagttaaataaagttttttgttatcgtcgtcgcgcgttttgcgtttgtaagggttaaacggtagcgtacgcggttggtaggtaggatttcggtttgtgggtttaagagtcgaggggcgtagggcgaatatgcgagttttatggtattagcgagaggttattaatttttatttatcgagggtatttttgtagttaatatttttattacgattatcgtttcgggggttatcgttgtatttttttgggtgagttttggagaaggtattgttcgggagaaggggtatagggcggggatggaatacggttgttagagaagttagggacgggcgacgt

SEQ ID NO: 168 - DNA, 1970 bp, Artificial Sequence
  chemically treated genomic DNA (Homo sapiens)
ggagagggggttggggtataaggaggggtttgtttgtgaagattatatgggttaggttgcggagggttaggtatgttcgtcgggagtgtagttggtttacgggaagtatttggagtggttgggaatgggcgtaggagtagcgtcgtgggagtataggtttttttttcggggcggtttatttggtgttttggtttttgtaaggtaggtcgaaagggtggggaggaaattgttagttttttatagcgttgggatggtggttttagggtttttgaggttagcggatgtgggtgtttgttattatgtgggttgttgaggggcggagattttaggggttattttaaagtaggacgagttttgagttacggtatttttgggggtagttttttaatcgagtagacgtttaggtttggaattttgtaatagaggttatagggttttgattagggtgttttgggaggtttagaattagtggtagtatatagggtagacggtaagtgatttggtatggggaaagaggtaggtgtttaggtcggtatagtatattcgtaaggaataggtagacgggaagtcgttcgtgggtttgtgtgtgtgttcggagttaaaattttgttaatgttttatgttttgggtatatttattttttttttggggagtatttttttttttatttttttttttttcgtttgttttttttatttagggttttttttatttttttcgttttggggatcgagggtattatggttttatgttttattatcgatgagttgtatagggatttagttttttcgttgtttaggtcgggttttttaggtttagggtttttaggaatggagagggtattagtgttttttatggatttaaatttttcgtatttcgtttttgttttttttttaagataggttttcgagttttaaggttttagggttttgtggaggtcgttacgtagtagtaaggagaatgttttgtatttggttgatgagatttttagagttttattttttatttttttattgtataaacgggtttttaggcgattgtagtattcgttattgttcgtaatagggtgataagagggatgattttttttttttttttttttttggttggtggaggtacggggttggcggacggtatgtgttttcgtgaatttaggttaaatttgttatcgtaaatacgattataattcgggtttttgtgtaataaaagtttttttaagtattagttgttggtttgttttgtttagcggtgtttgttgtaattagatttgtatatcgagaaagaatttaaaagtttttgatgtttgttgaaataatttggtttaggatttacgtgtttagattttagagttgtgtggtatttgagtttttttcgagtttttattgtcgttcgaggaggatttttagatttgtgttttggaggtagagtaggttgtgggacgggtttttgggtgggaaggattatgtggatatgtttttttgtttgagagttttaatattttcgggacgtgggagttggcgcgttggtaggatttaggtgttttttttttttttagagaaaaaggtttcgttgtttggtaataggtgtagatttgtttttaattaatgttagtaggttttttgcgtgatgaattttgttttttagttaagatttaaggtattttgtgaatattgtttttttgtagtttgagtttttgtggtgggaggtaggagttatggggagtgggggtaggttttttatacgggttttatagttattggtagtattgatttgatgttttttgagtttagagtttagggttagatagatttattgtttcgattacgagttggtttatttagaggggggcggatatagtatttaggtagtagatgtattgtgattagttttgtagcggggttgtgggttttttgggttggatgttcgggaagaggtaggtggaggtaaacgttaggatatttttgtagtga

SEQ ID NO: 169 - DNA, 1970 bp, Artificial Sequence
  chemically treated genomic DNA (Homo sapiens)
ttattgtaggggtgttttggcgtttatttttatttgttttttttcggatatttagtttagagaatttatagtttcgttgtaaggttgattatagtgtatttgttgtttgggtgttgtgttcgtttttttttaaatgaattaattcgtagtcgggatagtgggtttgtttggttttgggttttgaatttaaagagtattaagttagtgttgttagtggttgtgggattcgtgtaagaggtttgtttttattttttatggtttttgttttttattataaaagtttaaattgtagagaggtagtatttataggatgttttgagttttggttgaaaggtagggtttattacgtaagaggtttattggtattaattagggataggtttgtatttattattaagtaacggggtttttttttttagagaggaaagaggtatttgaattttgttagcgcgttagtttttacgtttcggaggtgttgggatttttagataagaaggtatatttatatggttttttttatttagaagttcgttttatagtttgttttgtttttagaatatagatttgggggtttttttcgggcgatagtgggggttcgggagaagtttagatgttatatagttttgggatttgagtacgtgggttttgggttagattgttttaataaatattaaggatttttggattttttttcggtgtgtaaatttggttatagtaaatatcgttgagtaaagtaggttaatagttggtatttggaaaggtttttgttatataaagattcgagttgtaatcgtgtttgcgataatagatttggtttgaatttacgaaagtatatgtcgttcgttagtttcgtgtttttattaattagaagggagaaagaggaaagggttattttttttgttattttattacgggtagtggcgggtgttgtagtcgtttggaggttcgtttgtatagtggaaaagtagaaaatgagattttaaaaattttattagttaaatataaaatattttttttgttgttacgtggcggtttttatagagttttaaaattttgaagttcggagatttattttgaagggggagtaaaggcgggatgcgggaagtttgagtttatggaagatattgatattttttttatttttgggaattttgagtttgaaggattcggtttgaatagcggaaggattgaatttttgtgtaatttatcggtgatggaatataaagttatggtgttttcggtttttaagacgggagggatggggaaggttttgggtgaaggggataggcggggaaggaaaaggtgaagagaaaggtgttttttagggagggggtagatgtgtttaggatatgggatattggtagaattttaatttcgagtatatatataggtttacggacggtttttcgtttatttgttttttacgggtgtgttgtgtcggtttgggtatttgtttttttttttatgttaggttatttgtcgtttattttgtatattgttattagttttaagttttttagaatattttgattagggttttgtggtttttgttataggattttaggtttagacgtttgttcgattggaaaattgtttttagagatgtcgtggtttagagttcgttttgttttggggtggtttttggagttttcgttttttagtaatttatatggtgataggtatttatattcgttggttttaggaattttggggttattattttagcgttgtaaggagttggtagttttttttttattttttcggtttattttgtaggaattaagatattaggtgagtcgtttcgggaaagagatttgtgtttttacggcgttgtttttgcgtttatttttagttattttagatgtttttcgtggattagttgtattttcggcgggtatgtttggtttttcgtagtttggtttatatgatttttataggtaggtttttttttatgttttagtttttttttt

SEQ ID NO: 170 - DNA, 5562 bp, Artificial Sequence
  chemically treated genomic DNA (Homo sapiens)
gtgttgtttgtttttggtttttttgatagttgtgttttatttttgttttgtgtttttttttttggatagtgttttttttagggtttatttaggagggtgtagtggtggtttttggggtggtggttgtggtgggggtgttagttgtaggggtgtttttggtgggtgggagttggtggttttttgttggtgttatgggatttgtatgtttgttttgtgttttttggtttttgagtttataggttgggattttgtttgttagttgtgtgtgttgttgtttaatttttgtaggtgtagagtgtgtggtggtggtgatagagaattttgtttggttgtttaaatatagttttttgtagaaggattttgtgtttggggaaggggaggaatttttttttttttgggtgtttgttttttttgttatggtttggtttttatatttgtttatatttggttgtagtggggtgtttggggggaggggttgaggttgtgttttttgttgttttttgggtgtgggttaggtggggaggaggggggtgttttggttgtgtgtttaggattgttttttagtggttatttgggttttagttttttaggtttggttttgataggtgggtggagtagttagtgtgagatagggaggttggtgtgggtgtgggaatttgatttgtttgggaggtgggggtggggtgggggtgtagtgtgtggggaggggttggtgtttgttttttttttttatttatttagttgagttagggggtttaggggtttttttggtggttagttttgtattgtaggagtgtgggtgtggtgttttagttagtgtgtagggtttgggttttgttgggggtgtttttttgttgttgttttttgtgtgatttgttgtttattagttattatgttggattttgtggttaatgtgtagttggatgggattattttggattttgaaggtgggtgttgggttggttgttgtggttgtggatgtgttggagaggattttgtgggtgggtttggtgtgggatgggggtgtgttgaggggagatgggagtgtgttgaggggagatgggatttttaatttaggtgtttttttgttgagagtgttgtgtgtttttggttttgtgtttgtgttgtttatgtgggggattttgttaggggtatttgtgtagattttgtgtgtttttataggattttgtgtttgttttgtgtattgttgtttgggtttttttttttttattgttgtttgtgtttgttaagtgatagtgatttttttgagggtttgtgaggttgttttggaattttttaggatgtatagttttattttgggaaatttattggttttttttttttggttttttttggtggtttttgggttttgtttggatttggtaatgggatagggaggttgttttttatttttgattgagtggatagttgtgttttgtttgggtggatagttttttttttttttatgttagttttggggttgttaagttgtgtagtttgtgggttgggagtattgaatggatatagtttaggttgtggtagggtttagagtgggatgttttatggtttttatttaggtttggggatatttttatttgttttttagaattgggttgtgggggatagaaggggtttgtgtgtgggtagggagagtattttggtttttttttgtttttggggtttataaagtgtgttgggatttgtggggttgttttgtttaagtttgggtttggtgtttgtgtttttgagtttgtgagtgtgtgtgtttttttgtgtttttttgattgttggtgttggggttttgtgttttgtgtttgtgggagtaaatatagtaggtgaaggggaagtttatataatggtttttagtgttttggggtagggtttttgaggggtgggtttgtttttgttgggatttggagtttttgttttttggagaggtttttaggttgatttgggtagagttttttggtgggttgggagggggaaaggttgtgttgaaatgagtaaattgtttaggtgttaggttaagttgggaggtgattagtttgaggttttttttgttttatggttagaattagggttgatatttgggtgttttgagtttagttgtttatatggtttatttggggttagttttatttgagtgggggaggtggggttttttgggggattagaattttggttggatgttaagtagagtgttagtggttgttttttagggttgggtttgaggagggtgtggggtggtgaagggatgggagggggttgtgatttagtggttattggtgttgtgtagagtgtgagttggaaatattgtagttattttgttagtttagtggtgaaagtttttttttaggttttatttttttgtatttttgttttttagagggaggggaggtttgggtttgtagagttgggagggtttgttgtttttgttttttttttttataatatttttttatttggatatttttgggtatatgtttatattggggtttttttaggtttattgtgttttgttgagttttttgtagtttttgagtgaatgtgatttttttgtttttgtttttttgtaatttttttttgtgattgtttttttaggggttttttttgttttaaatgtttaagtggtatgatttagttggtttgattattttttagtaagtttttatggagagaggttttgtgttgtgtagagttttttttttgtttgtgggattgaggtttttgtttttagtttttaatagaaagtgttgggtttttagtgggatttttggggaagaatttttgtgttttaatgggagttttgtggtgggaggggaggttagggtttggggttgtgtttgttgtatagttgttattatttgtattatgaaagttgttagtgttttttttttgggtttttgggtgtaattttatttttgtttttatgtgtttttatttggagttgtttttgtggttgttttttaagttagttttgtgattttgtaatttagtttaagataatgggtttattgagattattttggtgtagtagttggtaattttttggttttgggggaaggttttttagttttggggagtggggttttaatttgttggttttttgtgtttattagttttttttttgtgtgttttgaatggttttgttgggaattttggttttagagttattaggtggtttgagttgataggtgtgagagagtgtgtgtgtgtatgagtgtgtatgtgtatgggggttgatttggggtatggaaaggtggttttttttggtgtttaaggagtttggagtatagttggagggtgtgggggtgtgtatatgggagttggataattttgggtggatagatagatgtggggaagggatgattgaaggaggtggaggagagagtgtgatttagtttagttaggggtgatgtggataggtagtttttgaattagggtagagaaaagttattattagttagtaggggagaagttagtatggaggaggtggattttgagggagagtaggaattggattgtaagaggaaggagagttttttggttagtagtagttagtagtagtgggggaggttggaatgagttggttggagagggggttggggtataaggaggggtttgtttgtgaagattatatgggttaggttgtggagggttaggtatgtttgttgggagtgtagttggtttatgggaagtatttggagtggttgggaatgggtgtaggagtagtgttgtgggagtataggttttttttttggggtggtttatttggtgttttggtttttgtaaggtaggttgaaagggtggggaggaaattgttagttttttatagtgttgggatggtggttttagggtttttgaggttagtggatgtgggtgtttgttattatgtgggttgttgaggggtggagattttaggggttattttaaagtaggatgagttttgagttatggtatttttgggggtagttttttaattgagtagatgtttaggtttggaattttgtaatagaggttatagggttttgattagggtgttttgggaggtttagaattagtggtagtatatagggtagatggtaagtgatttggtatggggaaagaggtaggtgtttaggttggtatagtatatttgtaaggaataggtagatgggaagttgtttgtgggtttgtgtgtgtgtttggagttaaaattttgttaatgttttatgttttgggtatatttattttttttttggggagtatttttttttttattttttttttttttgtttgttttttttatttagggttttttttattttttttgttttggggattgagggtattatggttttatgttttattattgatgagttgtatagggatttagtttttttgttgtttaggttgggttttttaggtttagggtttttaggaatggagagggtattagtgttttttatggatttaaattttttgtattttgtttttgttttttttttaagataggtttttgagttttaaggttttagggttttgtggaggttgttatgtagtagtaaggagaatgttttgtatttggttgatgagatttttagagttttattttttatttttttattgtataaatgggtttttaggtgattgtagtatttgttattgtttgtaatagggtgataagagggatgattttttttttttttttttttttggttggtggaggtatggggttggtggatggtatgtgtttttgtgaatttaggttaaatttgttattgtaaatatgattataatttgggtttttgtgtaataaaagtttttttaagtattagttgttggtttgttttgtttagtggtgtttgttgtaattagatttgtatattgagaaagaatttaaaagtttttgatgtttgttgaaataatttggtttaggatttatgtgtttagattttagagttgtgtggtatttgagttttttttgagtttttattgttgtttgaggaggatttttagatttgtgttttggaggtagagtaggttgtgggatgggtttttgggtgggaaggattatgtggatatgtttttttgtttgagagttttaatatttttgggatgtgggagttggtgtgttggtaggatttaggtgttttttttttttttagagaaaaaggttttgttgtttggtaataggtgtagatttgtttttaattaatgttagtaggttttttgtgtgatgaattttgttttttagttaagatttaaggtattttgtgaatattgtttttttgtagtttgagtttttgtggtgggaggtaggagttatggggagtgggggtaggttttttatatgggttttatagttattggtagtattgatttgatgttttttgagtttagagtttagggttagatagatttattgttttgattatgagttggtttatttagaggggggtggatatagtatttaggtagtagatgtattgtgattagttttgtagtggggttgtgggttttttgggttggatgtttgggaagaggtaggtggaggtaaatgttaggatatttttgtagtga

SEQ ID NO: 171 - DNA, 5562 bp, Artificial Sequence
  chemically treated genomic DNA (Homo sapiens)
ttattgtaggggtgttttggtgtttatttttatttgtttttttttggatatttagtttagagaatttatagttttgttgtaaggttgattatagtgtatttgttgtttgggtgttgtgtttgtttttttttaaatgaattaatttgtagttgggatagtgggtttgtttggttttgggttttgaatttaaagagtattaagttagtgttgttagtggttgtgggatttgtgtaagaggtttgtttttattttttatggtttttgttttttattataaaagtttaaattgtagagaggtagtatttataggatgttttgagttttggttgaaaggtagggtttattatgtaagaggtttattggtattaattagggataggtttgtatttattattaagtaatggggtttttttttttagagaggaaagaggtatttgaattttgttagtgtgttagtttttatgttttggaggtgttgggatttttagataagaaggtatatttatatggttttttttatttagaagtttgttttatagtttgttttgtttttagaatatagatttgggggttttttttgggtgatagtgggggtttgggagaagtttagatgttatatagttttgggatttgagtatgtgggttttgggttagattgttttaataaatattaaggatttttggatttttttttggtgtgtaaatttggttatagtaaatattgttgagtaaagtaggttaatagttggtatttggaaaggtttttgttatataaagatttgagttgtaattgtgtttgtgataatagatttggtttgaatttatgaaagtatatgttgtttgttagttttgtgtttttattaattagaagggagaaagaggaaagggttattttttttgttattttattatgggtagtggtgggtgttgtagttgtttggaggtttgtttgtatagtggaaaagtagaaaatgagattttaaaaattttattagttaaatataaaatattttttttgttgttatgtggtggtttttatagagttttaaaattttgaagtttggagatttattttgaagggggagtaaaggtgggatgtgggaagtttgagtttatggaagatattgatattttttttatttttgggaattttgagtttgaaggatttggtttgaatagtggaaggattgaatttttgtgtaatttattggtgatggaatataaagttatggtgtttttggtttttaagatgggagggatggggaaggttttgggtgaaggggataggtggggaaggaaaaggtgaagagaaaggtgttttttagggagggggtagatgtgtttaggatatgggatattggtagaattttaattttgagtatatatataggtttatggatggttttttgtttatttgttttttatgggtgtgttgtgttggtttgggtatttgtttttttttttatgttaggttatttgttgtttattttgtatattgttattagttttaagttttttagaatattttgattagggttttgtggtttttgttataggattttaggtttagatgtttgtttgattggaaaattgtttttagagatgttgtggtttagagtttgttttgttttggggtggtttttggagtttttgttttttagtaatttatatggtgataggtatttatatttgttggttttaggaattttggggttattattttagtgttgtaaggagttggtagttttttttttatttttttggtttattttgtaggaattaagatattaggtgagttgttttgggaaagagatttgtgtttttatggtgttgtttttgtgtttatttttagttattttagatgttttttgtggattagttgtatttttggtgggtatgtttggttttttgtagtttggtttatatgatttttataggtaggtttttttttatgttttagttttttttttagttagtttattttagttttttttattgttgttggttgttgttggttagaaggttttttttttttttgtaatttaatttttatttttttttaaggtttgttttttttatattgattttttttttgttagttagtggtgatttttttttattttgatttggaagttgtttgtttatattatttttggttgggttgaattatatttttttttttattttttttaattattttttttttatgtttgtttgtttatttaaggttgtttaatttttatatatatatttttatattttttaattatattttaggttttttgggtattagggagggttatttttttatattttaggttagtttttatgtatatgtgtatttatgtatatatatatttttttatgtttattgatttgggttatttgatggttttaagattagaatttttagtaaaattatttaggatatataagggggagattgataaatatagggaattagtagattgaggttttattttttgagattgagaaatttttttttagagttaaaggattgttaattgttgtattaggatggttttaatgagtttattgttttggattaaattatagggttataaaattggtttgggagatagttgtagaagtagttttagatggaggtatatgggggtaagggtggagttatatttagagatttaaggaaggggtattaataatttttatagtgtaaatggtgatagttgtataatgaatataattttaaattttggtttttttttttgttatagggtttttgttgagatatgagagtttttttttagaaattttattgggggtttgatattttttgttaggaattgagagtagagattttgattttgtaggtaggaggagagttttgtataatatagggtttttttttataagggtttattggaaagtggttagattggttaagttgtgttatttggatatttgggataaggaaggtttttggaggagtggttgtagggaggagttgtaaagaggtaggggtagggaggttatatttatttggggattgtaggaggtttaatggaatatagtggatttagggagattttagtatgagtatgtgtttaaagatgtttagatgaggaggtgttgtgggggaggggggtgggaatagtaagtttttttagttttgtagatttagattttttttttttttgggaagtagggatgtaaagggatagagtttgaaaaagggtttttattattaagttgataaagtaattatgatgtttttagtttatattttgtatagtgttagtggttattggattataatttttttttgtttttttgttgttttatattttttttaggtttagttttgaagaatagttattggtattttgtttggtgtttagttaaagttttggttttttaggaggttttgttttttttatttagatagggttgattttaggtgggttgtgtgggtagttgggtttaggatatttagatgttagttttggttttggttatggagtggggaggattttaggttggttattttttagtttggtttgatatttggatagtttgtttattttaatatagttttttttttttttggtttattagagggttttgtttaagttagtttaggagtttttttgaggggtgggggttttaggttttggtagaggtaggtttgttttttagaagttttgttttagagtgttggagattattgtgtgagttttttttttgtttgttgtatttatttttgtggatgtaggatgtagagttttagtattggtagttaagaggatgtaggaaagtgtatgtatttataggtttagagatgtggatgttagatttaggtttggatagagtagttttgtaagttttaatatattttgtaaattttgaagataggagagagttaaaatattttttttgtttgtatgtaggttttttttgttttttatggtttgattttgggaggtggatgaggatatttttaggtttggatgggggttatgggatattttattttagattttgttatgatttgggttgtgtttgtttggtgtttttggtttatgggttgtataatttggtggttttgaaattggtgtgggggaggggagggttgtttatttgagtaggatgtggttgtttatttagttggaggtgaggaatgatttttttattttgttgttgggtttaagtggggtttgagagttgttggggagagttaaagggaggggattgatggattttttagagtgaaattgtgtgttttggagagttttgaggtagttttgtgagtttttgaggaggttgttgttgtttggtaaatataaataataataaaaggaaggaaatttaggtggtagtgtgtagaatgagtatagggttttgtgagggtgtgtagggtttatgtgggtgtttttaatagggttttttatgtaggtggtgtgggtatggggttgggggtgtgtggtgtttttagtgggagggtgtttggattaggggttttgtttttttttagtgtatttttgtttttttttagtgtatttttgttttgtgttaggtttatttgtagggttttttttagtatgtttgtggttgtagtagttagtttagtatttatttttgaagtttgaaatgattttatttagttgtgtgttgattgtggggtttgatatgatggttggtgggtagtgggttgtgtggagggtagtggtgaggaagtgtttttggtggggtttgggttttgtgtgttggttggggtgttgtgtttgtgtttttgtagtgtagagttagttgttggaggagtttttaggttttttggtttagttgaatgaatgggggaggaaggtgggtgttggtttttttttgtgtgttgtgtttttgttttgtttttgttttttgggtggattaggtttttgtatttgtattggtttttttgttttgtattggttgttttgtttgtttgttaaggttaggtttggggggttggggtttgagtggttgttgggggatagttttgggtatatgattggagtgttttttttttttttgtttggtttgtgtttaggggatggtgagagatgtggttttagtttttttttttgggtgttttgttgtggttagatgtgggtggatgtggaggttgggttatggtgaggagggtgggtgtttagaggggaagagatttttttttttttttgggtgtagggtttttttgtaggaggttgtatttgggtagttaaataaagttttttgttattgttgttgtgtgttttgtgtttgtaagggttaaatggtagtgtatgtggttggtaggtaggattttggtttgtgggtttaagagttgaggggtgtagggtgaatatgtgagttttatggtattagtgagaggttattaatttttatttattgagggtatttttgtagttaatatttttattatgattattgttttgggggttattgttgtatttttttgggtgagttttggagaaggtattgtttgggagaaggggtatagggtggggatggaatatggttgttagagaagttagggatgggtgatgt

SEQ ID NO: 172 - DNA, 1970 bp, Artificial Sequence
  chemically treated genomic DNA (Homo sapiens)
ggagagggggttggggtataaggaggggtttgtttgtgaagattatatgggttaggttgtggagggttaggtatgtttgttgggagtgtagttggtttatgggaagtatttggagtggttgggaatgggtgtaggagtagtgttgtgggagtataggttttttttttggggtggtttatttggtgttttggtttttgtaaggtaggttgaaagggtggggaggaaattgttagttttttatagtgttgggatggtggttttagggtttttgaggttagtggatgtgggtgtttgttattatgtgggttgttgaggggtggagattttaggggttattttaaagtaggatgagttttgagttatggtatttttgggggtagttttttaattgagtagatgtttaggtttggaattttgtaatagaggttatagggttttgattagggtgttttgggaggtttagaattagtggtagtatatagggtagatggtaagtgatttggtatggggaaagaggtaggtgtttaggttggtatagtatatttgtaaggaataggtagatgggaagttgtttgtgggtttgtgtgtgtgtttggagttaaaattttgttaatgttttatgttttgggtatatttattttttttttggggagtatttttttttttattttttttttttttgtttgttttttttatttagggttttttttattttttttgttttggggattgagggtattatggttttatgttttattattgatgagttgtatagggatttagtttttttgttgtttaggttgggttttttaggtttagggtttttaggaatggagagggtattagtgttttttatggatttaaattttttgtattttgtttttgttttttttttaagataggtttttgagttttaaggttttagggttttgtggaggttgttatgtagtagtaaggagaatgttttgtatttggttgatgagatttttagagttttattttttatttttttattgtataaatgggtttttaggtgattgtagtatttgttattgtttgtaatagggtgataagagggatgattttttttttttttttttttttggttggtggaggtatggggttggtggatggtatgtgtttttgtgaatttaggttaaatttgttattgtaaatatgattataatttgggtttttgtgtaataaaagtttttttaagtattagttgttggtttgttttgtttagtggtgtttgttgtaattagatttgtatattgagaaagaatttaaaagtttttgatgtttgttgaaataatttggtttaggatttatgtgtttagattttagagttgtgtggtatttgagttttttttgagtttttattgttgtttgaggaggatttttagatttgtgttttggaggtagagtaggttgtgggatgggtttttgggtgggaaggattatgtggatatgtttttttgtttgagagttttaatatttttgggatgtgggagttggtgtgttggtaggatttaggtgttttttttttttttagagaaaaaggttttgttgtttggtaataggtgtagatttgtttttaattaatgttagtaggttttttgtgtgatgaattttgttttttagttaagatttaaggtattttgtgaatattgtttttttgtagtttgagtttttgtggtgggaggtaggagttatggggagtgggggtaggttttttatatgggttttatagttattggtagtattgatttgatgttttttgagtttagagtttagggttagatagatttattgttttgattatgagttggtttatttagaggggggtggatatagtatttaggtagtagatgtattgtgattagttttgtagtggggttgtgggttttttgggttggatgtttgggaagaggtaggtggaggtaaatgttaggatatttttgtagtga

SEQ ID NO: 173 - DNA, 1970 bp, Artificial Sequence
  chemically treated genomic DNA (Homo sapiens)
ttattgtaggggtgttttggtgtttatttttatttgtttttttttggatatttagtttagagaatttatagttttgttgtaaggttgattatagtgtatttgttgtttgggtgttgtgtttgtttttttttaaatgaattaatttgtagttgggatagtgggtttgtttggttttgggttttgaatttaaagagtattaagttagtgttgttagtggttgtgggatttgtgtaagaggtttgtttttattttttatggtttttgttttttattataaaagtttaaattgtagagaggtagtatttataggatgttttgagttttggttgaaaggtagggtttattatgtaagaggtttattggtattaattagggataggtttgtatttattattaagtaatggggtttttttttttagagaggaaagaggtatttgaattttgttagtgtgttagtttttatgttttggaggtgttgggatttttagataagaaggtatatttatatggttttttttatttagaagtttgttttatagtttgttttgtttttagaatatagatttgggggttttttttgggtgatagtgggggtttgggagaagtttagatgttatatagttttgggatttgagtatgtgggttttgggttagattgttttaataaatattaaggatttttggatttttttttggtgtgtaaatttggttatagtaaatattgttgagtaaagtaggttaatagttggtatttggaaaggtttttgttatataaagatttgagttgtaattgtgtttgtgataatagatttggtttgaatttatgaaagtatatgttgtttgttagttttgtgtttttattaattagaagggagaaagaggaaagggttattttttttgttattttattatgggtagtggtgggtgttgtagttgtttggaggtttgtttgtatagtggaaaagtagaaaatgagattttaaaaattttattagttaaatataaaatattttttttgttgttatgtggtggtttttatagagttttaaaattttgaagtttggagatttattttgaagggggagtaaaggtgggatgtgggaagtttgagtttatggaagatattgatattttttttatttttgggaattttgagtttgaaggatttggtttgaatagtggaaggattgaatttttgtgtaatttattggtgatggaatataaagttatggtgtttttggtttttaagatgggagggatggggaaggttttgggtgaaggggataggtggggaaggaaaaggtgaagagaaaggtgttttttagggagggggtagatgtgtttaggatatgggatattggtagaattttaattttgagtatatatataggtttatggatggttttttgtttatttgttttttatgggtgtgttgtgttggtttgggtatttgtttttttttttatgttaggttatttgttgtttattttgtatattgttattagttttaagttttttagaatattttgattagggttttgtggtttttgttataggattttaggtttagatgtttgtttgattggaaaattgtttttagagatgttgtggtttagagtttgttttgttttggggtggtttttggagtttttgttttttagtaatttatatggtgataggtatttatatttgttggttttaggaattttggggttattattttagtgttgtaaggagttggtagttttttttttatttttttggtttattttgtaggaattaagatattaggtgagttgttttgggaaagagatttgtgtttttatggtgttgtttttgtgtttatttttagttattttagatgttttttgtggattagttgtatttttggtgggtatgtttggttttttgtagtttggtttatatgatttttataggtaggtttttttttatgttttagtttttttttt

1. A method for detecting and/or classifying a cell proliferative disorder in a subject, comprising determining the expression levels of Septin 9 in a biological sample isolated from a human subject, wherein altered expression and/or CpG methylation, relative to a control sample, or a known standard, is indicative of the presence or class of said disorder.

2. The method according to claim 1, wherein a neoplastic cell proliferative disorder is distinguished from a benign cell proliferative disorder said method characterized in that underexpression and/or the presence of CpG methylation is indicative of the presence of a neoplastic cell proliferative disorder and the absence thereof is indicative of the presence of a benign cell proliferative disorder.

3. The method according to claim 1, wherein said cell proliferative disorder is cancer.

4. The method according to claim 3, wherein said cell proliferative disorder is hepatocellular or colorectal carcinoma.

5. The method according to claim 1, wherein determining said expression level comprises detecting the presence, absence or level of mRNA transcribed from said gene.

6. The method according to claim 1, wherein determining said expression level comprises detecting the presence, absence or level of a polypeptide encoded by said gene or sequence thereof.

7. The method according to claim 6, wherein said polypeptide is detected by at least one means selected from the group consisting of western blot analysis, chromatography, immunoassay, ELISA immunoassay, radioimmunoassay, and antibody.

8. The method according to claim 1, wherein determining said expression comprises detecting the presence or absence of CpG methylation within said gene, and wherein the presence of methylation indicates the presence of a cell proliferative disorder.

9. A method for detecting and/or classifying a cell proliferative disorder in a subject, comprising contacting genomic DNA isolated from a biological sample obtained from a human subject with at least one reagent, or series of reagents that distinguishes between methylated and non-methylated CpG dinucleotides within at least one target region of the genomic DNA, wherein the target region comprises, or hybridizes under stringent conditions to a sequence of at least 16 contiguous nucleotides of at least one sequence selected from the group consisting of SEQ ID NOS:1 to SEQ ID NO:3 and SEQ ID NO:159, wherein said contiguous nucleotides comprise at least one CpG dinucleotide sequence, wherein CpG methylation is indicative of the presence or class of said disorder, and wherein detecting and/or classifying a cell proliferative disorder is thereby, afforded.

10. The method of claim 9 for detecting and/or classifying a cell proliferative disorder, comprising:
a) extracting or otherwise isolating genomic DNA from a biological sample obtained from a human subject;
b) treating the genomic DNA of a), or a fragment thereof, with one or more reagents to convert cytosine bases that are unmethylated in the 5-position thereof to uracil or to another base that is detectably dissimilar to cytosine in terms of hybridization properties;
c) contacting the treated genomic DNA, or the treated fragment thereof, with an amplification enzyme and at least one primer comprising a contiguous sequence of at least 9 nucleotides that is complementary to, or hybridizes under moderately stringent or stringent conditions to a sequence selected from the group consisting of SEQ ID NOS:4 to SEQ ID NO:15 and SEQ ID NOS:160 to SEQ ID NO:163, and complements thereof, wherein the treated genomic DNA or the fragment thereof is either amplified to produce at least one amplificate, or is not amplified; and
d) determining, based on a presence or absence of, or on a property of said amplificate, the methylation state or level of at least one CpG dinucleotide of a sequence selected from the group consisting of SEQ ID NOS:1 to SEQ ID NO:3 and SEQ ID NO:159, or an average, or a value reflecting an average methylation state or level of a plurality of CpG dinucleotides of a sequence selected from the group consisting of SEQ ID NOS:1 to SEQ ID NO:3 and SEQ ID NO:159.

11. The method of claim 10, wherein treating the genomic DNA, or the fragment thereof in b), comprises use of at least one reagent selected from the group consisting of bisulfite, hydrogen sulfite, and disulfite.

12. The method of claim 10, wherein contacting or amplifying in c) comprises use of at least one method selected from the group consisting of: use of a heat-resistant DNA polymerase as the amplification enzyme; use of a polymerase lacking 5′-3′ exonuclease activity; use of a polymerase chain reaction (PCR); and generation of an amplificate nucleic acid molecule carrying a detectable label.

13. (canceled)

14. The method of claim 10, further comprising in step c) the use of at least one nucleic acid molecule or peptide nucleic acid molecule comprising in each case a contiguous sequence at least 9 nucleotides in length that is complementary to, or hybridizes under moderately stringent or stringent conditions to a sequence selected from the group consisting of SEQ ID NOS:4 to SEQ ID NO:15 and SEQ ID NOS:160 to SEQ ID NO:163, and complements thereof, wherein said nucleic acid molecule or peptide nucleic acid molecule suppresses amplification of the nucleic acid to which it is hybridized.

15. The method of claim 10, wherein determining in d) comprises hybridization of at least one nucleic acid molecule or peptide nucleic acid molecule in each case comprising a contiguous sequence at least 9 nucleotides in length that is complementary to, or hybridizes under moderately stringent or stringent conditions to a sequence selected from the group consisting of SEQ ID NOS:4 to SEQ ID NO:15 and SEQ ID NOS:160 to SEQ ID NO:163, and complements thereof.

16. The method of claim 15, wherein at least one such hybridizing nucleic acid molecule or peptide nucleic acid molecule is bound to a solid phase.

17. The method of claim 15, further comprising extending at least one such hybridized nucleic acid molecule by at least one nucleotide base.

18. The method of claim 10, wherein determining in d), comprises sequencing of the amplificate.

19. The method of claim 10, wherein contacting or amplifying in c), comprises use of methylation-specific primers.

20. The method of claim 9 for detecting and/or classifying a cellular proliferative disorder, comprising:
a) extracting or otherwise isolating genomic DNA from a biological sample obtained from the subject;
b) digesting the genomic DNA of a), or a fragment thereof, with one or more methylation sensitive restriction enzymes;
c) contacting the DNA restriction enzyme digest of b) with an amplification enzyme and at least two primers suitable for the amplification of a sequence comprising at least one CpG dinucleotide of a sequence selected from the group consisting of SEQ ID NOS:1 to SEQ ID NO:3 and SEQ ID NO:159; and
d) determining, based on a presence or absence of an amplificate the methylation state or level of at least one CpG dinucleotide of a sequence selected from the group consisting of SEQ ID NOS:1 to SEQ ID NO:3 and SEQ ID NO:159.

21. The method according to claim 20 wherein the presence or absence of an amplificate is determined by means of hybridization to at least one nucleic acid or peptide nucleic acid which is identical, complementary, or hybridizes under stringent or highly stringent conditions to an at least 16 base long segment of a sequence selected from the group consisting of SEQ ID NOS: 1 to SEQ ID NO:3 and SEQ ID NO:159.

22. A treated nucleic acid derived from any one of genomic SEQ ID NOS:1 to SEQ ID NO:3 or SEQ ID NO:159, wherein the treatment is suitable to convert at least one unmethylated cytosine base of the genomic DNA sequence to uracil or another base that is detectably dissimilar to cytosine in terms of hybridization.

23. A nucleic acid, comprising at least 16 contiguous nucleotides of a treated genomic DNA sequence selected from the group consisting of SEQ ID NOS:4 to SEQ ID NO:15, SEQ ID NOS:160 to SEQ ID NO:163, and sequences complementary thereto, wherein the treatment is suitable to convert at least one unmethylated cytosine base of the genomic DNA sequence to uracil or another base that is detectably dissimilar to cytosine in terms of hybridization.

24. The nucleic acid of claim 23, comprising at least 50 contiguous nucleotides of a DNA sequence selected from the group consisting of SEQ ID NOS:4 to SEQ ID NO:15, SEQ ID NOS:160 to SEQ ID NO:163, and sequences complementary thereto.

25. The nucleic acid of claim 23, wherein the contiguous base sequence comprises at least one CpG, TpG or CpA dinucleotide sequence.

26. (canceled)

27. A kit suitable for performing the method according to claim 3, comprising:
a) a plurality of oligonucleotides or polynucleotides able to hybridise under stringent or moderately stringent conditions to transcription products of the Septin 9 gene;
b) a container suitable for containing the oligonucleotides or polynucleotides and a biological sample of a patient comprising the transcription products wherein the oligonucleotides or polynucleotides can hybridise under stringent or moderately stringent conditions to the transcription products;
c) means to detect the hybridisation of b); and optionally
d) instructions for use and interpretation of the kit results.

28. A kit suitable for performing the method according to claim 5, comprising:
a) a means for detecting Septin 9 polypeptides;
b) a container suitable for containing the said means and a biological sample of a patient comprising the polypeptides, wherein the means can form complexes with the polypeptides; and
c) a means to detect the complexes of b).

29. A kit suitable for performing the method according to claim 9, comprising:
a) a bisulfite reagent;
b) a container suitable for containing the said bisulfite reagent and a biological sample of a patient;
c) at least one set of oligonucleotides comprising two oligonucleotides whose sequences in each case are identical, are complementary, or hybridize under stringent or highly stringent conditions to a 9 or more preferably 18 base long segment of a sequence selected from the group consisting of SEQ ID NOS:4 to SEQ ID NO:15, SEQ ID NOS:160 to SEQ ID NO:163, and sequences complementary thereto.

30. A kit suitable for performing the method according to claim 9, comprising:
a) a methylation sensitive restriction enzyme reagent;
b) a container suitable for containing the said reagent and a biological sample of a patient;
c) at least one set of oligonucleotides or a plurality of nucleic acids or peptide nucleic acids which are identical, are complementary, or hybridize under stringent or highly stringent conditions to an at least 9 base long segment of a sequence selected from the group consisting of SEQ ID NOS:1 to SEQ ID NO:3 and SEQ ID NO: 159; and optionally
d) instructions for use and interpretation of the kit results.

31. (canceled)

32. The method of claim 1, wherein the biological sample obtained from the subject is at least one selected from the group consisting of cell lines, histological slides, biopsies, paraffin-embedded tissue, body fluids, stool, colonic effluent, urine, blood plasma, blood serum, whole blood, isolated blood cells, and cells isolated from the blood.

33. The method of claim 9, wherein the biological sample obtained from the subject is at least one selected from the group consisting of cell lines, histological slides, biopsies, paraffin-embedded tissue, body fluids, stool, colonic effluent, urine, blood plasma, blood serum, whole blood, isolated blood cells, and cells isolated from the blood.
